(19) United States
(12) Patent Application Publication
(10) Pub. No.: US 2019/0264184 A1
(43) Pub. Date: Aug. 29, 2019

(54) COMPOSITIONS AND METHODS FOR THE PRODUCTION OF COMPOUNDS

(71) Applicant: Ginkgo Bioworks, Inc., Boston, MA (US)

(72) Inventors: Daniel C. GRAY, Medford, MA (US); Enhu LI, Newton, MA (US); Brian R. BOWMAN, New Rochelle, NY (US); Gregory L. VERDINE, Boston, MA (US); Keith ROBISON, Andover, MA (US); Marc CHEVRETTE, Madison, WI (US); Dan UDWARY, Davis, CA (US); Pam Shouping WANG, Cambridge, MA (US); Anna LI, Cambridge, MA (US); Jay P. MORGENSTERN, Boston, MA (US)

(21) Appl. No.: 16/345,595

(22) PCT Filed: Oct. 27, 2017
(86) PCT No.: PCT/US17/58800

§ 371 Date: Apr. 26, 2019

Related U.S. Application Data
(60) Provisional application No. 62/414,410, filed on Oct. 28, 2016.

(51) Int. Cl. C12N 9/10; C12N 15/76; C12P 17/18; A61P 17/06; A61P 25/00; C12N 15/52; C12N 1/20; C12R 1/485; C12R 1/55

(52) U.S. Cl. CPC C12N 9/1029; C12N 15/76; C12P 17/188; A61P 17/06; C12Y 203/01; C12N 15/52; C12N 1/20; C12R 1/485; C12R 1/55; A61P 25/00

(57) ABSTRACT

The present disclosure provides proteins, nucleic acids, vectors, and host molecules useful for the production of compounds of interest, and methods for their use.

### BACKGROUND

[0001] Polyketide natural products are produced biosynthetically by polyketide synthases (PKSs), e.g., type I polyketide synthases, in conjunction with other tailoring enzymes. Polyketide synthases (PKSs) are a family of large, multi-domain proteins whose catalytic functions are organized into modules to produce polyketides. The basic functional unit of polyketide synthase clusters is the module, which encodes a 2-carbon extender unit, e.g., derived from malonyl-CoA. The modules generally present in a polyketide synthase include i) a loading module; ii) extending modules; and iii) releasing modules. Within the module, the minimal domain architecture required for polyketide chain extension and elongation includes the ketosynthase (KS), acyl-transferase (AT) and the ACP (acyl-carrier protein) domains, and the specific chemistry of each module is encoded by the AT domain and by the presence of the β-ketone processing domains: ketoreductase (KR), dehydratase (DH), and enoylreductase (ER) domains. Polyketide synthase biosynthesis proceeds by two key mechanisms: polyketide chain elongation with a polyketide synthase extending module and translocation of the polyketide intermediate between modules. Productive chain elongation depends on the concerted function of the numerous catalytic domains both within and between modules.

[0002] Combinatorial biosynthesis is a general strategy that has been employed to engineer polyketide synthase (PKS) gene clusters to produce novel drug candidates (Weissman and Leadlay, Nature Reviews Microbiology, 2005). To date, these strategies have relied on engineering PKS domain deletions and/or domain swaps within a module or by swapping an entire module from another cluster to produce a chimeric cluster. The problem with this approach is that protein engineering of the polyketide megasynthases via wholesale domain and/or module replacement, insertion, or deletion can perturb the “assembly line” architecture of the PKS, thus drastically reducing the amount of polyketide synthesized.

### SUMMARY OF THE INVENTION

[0003] The present disclosure provides compositions and methods for use in combinatorial biosynthesis of polyketides without a significant loss of compound production by module swapping between polyketide synthase genes. Bioinformatics approaches may be used to predict module interface compatibility and therefore, the likelihood that a heterologous module may be swapped into a PKS gene. The resulting compatibility information may be used to engineer a polyketide synthase with an increased likelihood of functioning in assembly-line polyketide biosynthesis.

[0004] Accordingly, in one aspect, the disclosure provides an engineered polyketide synthase that includes one or more heterologous modules with altered enzymatic activity relative to a reference polyketide, wherein the engineered polyketide synthase is capable of producing a polyketide when expressed under conditions suitable to allow expression of a compound by the engineered polyketide synthase and wherein the one or more heterologous modules do not substantially inhibit polyketide translocation during polyketide biosynthesis.

[0005] In another aspect, the disclosure provides an engineered polyketide synthase including one or more heterologous modules with altered enzymatic activity relative to a reference polyketide, wherein the engineered polyketide synthase is capable of producing a polyketide when expressed under conditions suitable to allow expression of a compound by the engineered polyketide synthase and wherein the one or more heterologous modules include linking sequences which are compatible to the linking sequences of the modules adjacent thereto.

[0006] In another aspect, the disclosure provides an engineered polyketide synthase including one or more heterologous modules with altered enzymatic activity relative to a reference polyketide, wherein the engineered polyketide synthase is capable of producing a polyketide when expressed under conditions suitable to allow expression of a compound by the engineered polyketide synthase and wherein the polyketide expression level of the engineered polyketide synthase is at least 1% (e.g., at least 1%, at least 2%, at least 3%, at least 4%, at least 5%, at least 6%, at least 7%, at least 8%, at least 9%, at least 10%, at least 20%, at least 30%, at least 40%, at least 50%, at least 60%, at least 70%, at least 80%, at least 90%, at least 100%, at least 110%, at least 120%, at least 130%, at least 140%, at least 150%) of the polyketide expression level of the reference polyketide synthase.

[0007] In some embodiments, the polyketide expression level of the engineered polyketide synthase is at least 1-10% (e.g. at least 1-10%, at least 11-20%, at least 21-30%, at least 31-40%, at least 41-50%, at least 51-60%, at least 61-70%, at least 71-80%, at least 81-90%, at least 91-100%, at least 101-110%, at least 1111-120%, at least 121-130%, at least 131-140%, at least 141-150%). In some embodiments, the engineered polyketide synthase includes one or more heterologous modules with native linking sequences.

[0008] In some embodiments, the engineered polyketide synthase may include one, two, three, or more heterologous modules. In some embodiments in which the engineered polyketide synthase contains multiple heterologous modules, the heterologous modules may be adjacent in the engineered polyketide synthase. In some embodiments in which the polyketide synthase contains multiple heterologous modules, any of the modules may be separated by one or more native modules in the engineered polyketide synthase.

[0009] In some embodiments of any of the above described aspects, at least one of the one or more heterologous modules is an elongation module which modifies a β-carbonyl unit in the variable region of the polyketide.

[0010] In some embodiments of any of the above described aspects, at least one of the one or more heterologous modules includes a portion having at least 90% identity to any one of SEQ ID NO: 1-174.

[0011] In some embodiments of any of the above described aspects, at least one of the one or more heterologous modules includes a portion having the sequence of any one of SEQ ID NO: 1-174.

SEQ ID NO: 1
QPLAIVGMACRLPGGVSSPEDLWRLVESGTDAISGFPVDRGWDVDGLYDPDPDVPGKSYTVEGGFLDAVTGFDAPFF
GISPREALAMDPQQRLVLEASWEAFERAGIEPGSVRGSDTGVFMGAFPGGYGTGADLGGFGMTGGAASVLSGRVSYF
FGLEGPAMTVDTVCSSSLVALHQAGYALRHGECSLALVGGVTVMSTPQTFVEFSRQRGLAADGRCKAFSDDADGTGW
SEGVGVLLVERLSDAQARGHNILAVVRGSAVNQDGASNGLTAPNGPSQQRVIRQALANAGLTGADVDVVEAHGTGTT
LGDPIEAQAVIATYGQDRDQPVLLGSLKSNLGHTQAAAGVSGVIKMVMALQNGVVPRTLHVEEPSRHVDWTAGAVEL
VTENQPWPELGRARRAAVSSFGLSGTNAHVILESAPDQPPAPSTDSPVSAVTAGVVPLPISAKTLPALADLEDRLRT
YLTTTPDTDLPAVASTLATTRSLFEHRAVLLGEDTVTGTAIPDPRVVFVFPGQGWQWQGMGSALLTSSTVFAERMAE
CAAALSEFVDWDLLTVLDDPSVVDRVDVVQPACWAVMISLAAVWQAAGIHPDIVLGHSQGEIAAACLAGAISLPDAA
RIVAQRSQLIAHQLGHGAMASISLPADDIPTTDQVWIAAHNGTSTVIAGDPQAVEAVLATCETRGARVRKINVDYAS
HTPHVEQIRTELLDITTGIEAHTPAVPWLSTTDNTWIDQPLDPTYWYRNLREPVRFGPAIDLLQTQDNNLFIEISAS
PVLLQTMDNAATVATLRRDEDTTHRLLTAFAEAHVHGATINWPTVLDTTTTPVDLPTYPFQRQRYWATSNGHPADLT
PEALLKVVRDSAAMVLGHASADTVPTATAFQELGLDSLTAVELRNSLTKATGLRLPATMAFDYPTPDALAARL
SEQ ID NO: 2
EPLAIVGMACRLPGGVSSPEDLWRLVESGTDAITDFPTDRGWDTDTLFDPDPDTPGKTYTVHGGFLDDVAGFDAPFF
GISPREAVAMDPQQRLVLESSWEAFERAGIQPDSIRGSDTGVFMGAYPDGYGIGADLAGFGVTAGAGSVLSGRVSYF
FGLEGPAMTVDTACSSSLVALHQAAYALRQGECSLALVGGVTVMPSPRTFIEFSRQRGLAADGRSKAFADAADGTGF
SEGVGVLLVERLSDAQAKGHNILALVRSSAVNQDGASNGLTAPNGPSQQRVIQSALAGAGLTSADVDVVEAHGTGTT
LGDPIEAQAVLATYGQDRDRPVLLGSLKSNLGHTQAAAGVSGVIKMVMALQHNTVPATLHVDAPSRHVDWTAGAVRL
ATENQPWPETNRPRRAGVSSFGVSGTNAHVILEQAPAASPVEPVDTTDVVVPLVVSARSSGSLSDQADRLAALVGSP
DAPALTSLADALLTRRTVFSQRAVVVAGSHEQAAAGLRALAAGDSHPALVTGAAGPARVVLVFPGQGSQWAGMGAEL
LDASPVFAARIAECAEALRPWVDWSLDEVLRGDASADVLGRVDVVQPASFAVMVGLAAVWESAGVRPDAVLGHSQGE
IAAAYVAGALSLTDAAKIVAVRSRLIAARLGRGGMASVALAPEEAAKLGRTELAAVNSPASVVIAGDAEALDETLAM
LEGEGVRVRRVAVDYASHTPHVEELEQSMAEALADVRSRQPRVRFLSTVTGDWVTEAGALDGGYWYRNLRQPVRFGP
AVASLAEAGYTVFVEASAHPVLVQPVAETLDRTDAVVTGTLRRQDGGLPRLLTSMAELFVGGVPVNWPVLLPAGAVR
GWVDLPTYAFDHQRYWLENRELTPEALLKLVCGRAAAVLGHVDADAVPVAAAFRDLGVDSLTAVELRNSLAKATGLR
LPATLVFDYPTPTVLAGRL
SEQ ID NO: 3
EPLAIVGMACRLPGGVLSPEDLWRLVESGGDAISGFPVDRGWDVENLFDPDPDAAGRTYAVRGGFLDGAAGFDASFF
GISPREAQAMDPQQRLVLEVSWEAFERAGIEPGSVRGSDTGVFMGAYPGGYGMGTDLGGFGMTSVAVSVLAGRVSYF
FGLEGPAMTVDTACSSSLVALHQAGSALRQGECSLALVGGVTVMPTPQTFVEFSRQRGLAADGRCKAFADAADGTGF
SEGVGVLLVERLSDAQARGHNILAVVRGSAVNQDGASNGLTAPNGPSQQRVIQSALAGAGLTSADVDVVEAHGTGTT
LGDPIEAQAVIATYGQDRDQPVLLGSLKSNLGHTQAAAGVSGVIKMVMALQNGVVPRTLHIDEPSRHIDWTAGAVEL
VTENQSWPETGRDRRAAVSSFGISGTNAHVILESAPAQPVPPVDTPVSDVTAGVVPLPISARTVPALADLEDRLRAY
LTTTPETDLPAVASTLAMTRSVFEHRAVLLGEETVTGIAVSDPRVVFVFSGQGSQRVGMGEELAAAFPLFARLHRQV
WDLLDVPDLEVDDTGYVQPALFALQVALFGLLESWGVRPQAVLGHSVGEVAAGYVAGVWSLEDACTLVSARARLMQA
LPAGGAMVAVPVSEEQARAVLVDGVEIAAVNGPASVVLSGDESAVLRVAEGLGRWTRLSASHAFHSVRMEPMLEEFR
QVASELTYREPRIVMAAGEQVTTPEYWVRQVRDTVRFGDQVAAFGDAVFLEIGPDRTLSRLIDGIAMLDGDDEVRAA
VAALAVMHVQGVGVDWPAILGTTTGRVLDLPTYAFQHERYWMVIQELSPEALLKIVRDSAAMVLGHANADTVPTATA
FQELGLDSLTAVELRNSLTKATGLRLPATMAFDYPTPAALAGRL
SEQ ID NO: 4
EPLAIVGMACRLPGGVSTPEDLWRLVESGTDAITDFPTDRGWDTDDLFDPDPDTPGKTYTVHGGFLDDVAGFDASFF
GISPREALAMDSQQRLVLEASWEAFERAGIEPGSVRGSDTGVFMGAYPDGYGIGVDLGGFGATAGAGSVLSGRLSYF
FGLEGPAMTVDTACSSSLVALHQAGSALRQGECSLALVGGVTVIANPQIFVEFSRQRGLAADGRCKAFADNADGTGF
SEGVGVLLVERLSDAQARGHNILALVRSSAVNQDGASNGLTAPNGPSQQRVIRQALANAGLTGAEVDVVEAHGTGTT
LGDPIEAQAVLATYGQDRDQPVLLGSLKSNLGHTQAAAGVSGVIKMVMALRHDTVPATLHIDEPSRHIDWTAGAVEL
VTENQPWPVLDRPRRAAVSAFGVSGTNAHVILESAPDQPPASATDTPAPAVTAGVVPLPISAKTVPALADLEDRLRA
YLTTTPETDLPAVASTLATTRSLFEHRAVLLGEDTVTGTTIPDPRIVFVFPGQGWQWQGMGSALLTSSTVFAERMAE
CAAALSEFVDWDLLTVLDDPSIVDRVDVVQPACWAVMISLAAVWQAAGIHPDIVLGHSQGEIAAACLAGAISLPDAA
RIVAQRSQLIAHQLGHGAMASISLPADDIPTTDKVWIAAHNGTSTVIAGDPQAVEAILATCETRGARVRKINVDYAS
HTPHVEQIRTELLDITTGIEAHTPTVPWLSTTDNTWIDQPLDPTYWYRNLREPVRFGPAIDLLQTQDNNLFIEISAS
PVLLQTMDNATTVATLRRDEDTTQRLLTAFAEAHVHGATINWPTVLNTTTTPVDLPTYPFQRQRYWATSNDRLNGRT
SVEQHRIMVELVLAHATSVLGHESPDAIAPDRAFKDLGMDSLTAIELRNHLVAETGVRLPATTAFDHPTADDLAKRL
SEQ ID NO: 5
EPIAIVSMSCRAPGGVDSPESLWRLVESGTDAITDFPGDRGWDVAGLYSPDPTGYKTYCVQGGFLDAAADFDAAFFG
ISPREALGMDPQQRLLLETSWEAIERARIDPRSLPGRNVGVYVGGAAQGYGVGAIDQQRDNVITGSSISLLSGRLSY
ALGLEGPGVTVDTACSSSLVALHLACQALRQRECSMALVSGVSVIPTPDVFVEFSRQRGLAADGRCKSFSASADGTI
WAEGVGVLVLERLSEATRLGHRVLAVVRGSAVNSDGASNGLTAPNGVSQQRVIRQALTGAGLTAADVDVVEAHGTGT
KLGDPIEAEAILATYGQDRSTPVCLGSLKSNIGHAMAASGVLAVIKMVEAMRHGLIPRTLHVEEPSPHVDWASGDVA
LLTENQPWPDDAKLRRAGVSSFGLSGTNAHVVLEQYRAPAAPDITTTEHQPLAWTLSARDPKALREQAGRLHAALTE
SPRWRPLDIGYSLATTRSNFAHRAVAVGSDRELLRALSKLADGSAWPALVTATAKDRRVAYLFDGQGSQRPDMGSGL
YERFPAFARAWDRISAEFGKHLDHSLTDVYLGRGDAATADLVDDTLYAQAGLFTMEIALFELLAEWGVRPDFVSGHS
IGETAAAYAAGVLSLEDVTKLIVARGRALRQVPPGAMVALRAGEDEAREFLGRTGAALDLAAVNSPTSVVVSGASEA
VAGFRARWTESGREARTLNVRHAFHSRHVEAVLGEFREVLESLTFRTPALPVVSTVTGRLIEPTELSTSEYWLRQVR
QTVRFHDAVRELSGQGVGTFVEIGPSGALASAGLECLGDEASFHAVQRPGSPGDVCLMTAVAELHAGGTTVDWATVL
AGGRATDLPVYPFQHGSYWLAPARPSAPEEPRTMLELVRLEAAIALSITDPGLIADDSSFLDLGFDSISALRLSNRL
AAVTGLDLPPSLLFDHPTPAELAARLD
SEQ ID NO: 6
EPLAIVGMACRLPGGVSSPDDLWRLVASGTDAISEFPADRGWDVDNLYDPDPDAPGKTYTVLGGFLDGVAGFDASFF
GISPREALAMDPQQRLMLEVSWEAFEHAGIPPRSVRGSDTGVFMGAFPSGYNAGLEEFGMTGDAVSVLSGRVSYFFG
LEGPAITVDTACSSSLVALHQASSALRQGECSLALVGGVTVLATPQTFVEFSRQRGLALDGRSKAFADAADGAGWAE
GVGVLVVERLSDARAKGHQIWGVIRGSAVNQDGASNGLSAPNGPSQQRVIRQALANAGLAPHEVDVVEAHGTGTMLG
DPIEAQAVIATYGQDREQPLLLGSLKSNVGHTQAAAGVSGVIKMVMALQHDTVPATLHVDAPSRHVDWTAGAVELVT
ENRPWPETGRVRRAGVSSFGISGTNAHVILESAPEQPASPPEAVAPVVASDRVPLVISAKTPAALAEMENRLRAYLA
AAPGADPRAVASTLATARSVFEHRAVLLGENTITGTVAGADPRVVFVFPGQGWQQLGMGRALRESSPVFAARMAECA
AALSEFVDWDLFTMLDDPAVIDRIDVLQPACWAVMMSLAAVWQAAGVRPDAVIGHSQGEIAAACVAGALSLRDAARI
VALRSQLLAREMGHGVMAAVALPADDIPLVDGVWIGARNGPSSTVISGTPEAVEVVVAACEERGARVRRITAAVASH
SPLGEKIRTELLGISASIPSRTPVVPWLSTADGIWIEAPLDPAYWWRNLREPVGFGPAVDLLQARGENVFLEMSASP
VLLPAMNDAVTVATLRRDDDTPDRMLTALAEAHAHGVIVDWPRVFGSTTRVLDLPTYAFEHQRYWAVNGRPADLTPE
ALLKLVCGRAAAVLGHVDADAVPVAVAFRDLGVDSLTAVELRNSLAKATGLRLPATLVFDYPTPTVLAGRL
SEQ ID NO: 7
EPLAIVGMACRLPGGVLSPEDLWRLVESGGDAISGFPVDRGWDVENLFDPDPDAAGRTYAVRGGFLDGAAGFDASFF
GISPREAQAMDPQQRLVLEVSWEAXERAGIEPGSVRGSDTGVFMGAYPGGXGXGTDLGGFGMTSVAVSVLAGRVSYF
FGLEGPAMTVDTACSSSLVALHQAGSALRQGECSLALVGGVTVMPTPQTFVEFSRQRGLAADGRCKAFADAADGTGF
SEGVGVLLVERLSDAQARGHNILAVVRGSAVNQDGASNGLTAPNGPSQQRVIRQALANAGLAGAEVDVVEAHGTGTT
LGDPIEAQAVIATYGQDRDQPVLLGSLKSNLGHTQAAAGVSGVIKMVMALRHDTVPATLHIDEPSRHIDWTAGAVEL
VTENQSWPETGRDRRAAVSSFGISGTNAHVILESAPAQPVPPMDTPVSAVTAGVVPLPISARTVPALADLEDRLRAY
LTATPETDLPAVASTLAVTRSVFEHRAVLLGEETVTGIAVSDPRVVFVFSGQGSQRVGMGEELAAAFPLFARLHRQV
WDLLDVPDLEVDDTGYVQPALFALQVALFGLLESWGVRPQAVIGHSVGEVAAGYVAGVWSLEDACTLVSARARLMQA
LPAGGAMVAVPVSEERARAVLVDGVEIAAVNGPASVVLSGDESAVLRVAEGLGRWTRLSASHAFHSVRMEPMLEEFR
QVASELTYREPRIVMAAGEQVTTPEYWVRQVRDTVRFGDQVAAFGDAVFLEIGPDRTLSRLIDGIPTLHGDDEQHAV
VAALAELHVQGVPIDWSSILGVNPARVDLPTYAFQHERYWMVIQELSPEALLKIVRDSAAMMLGHPNTDAIAATTAF
RDLGVDSLIAVELRNSLAKATGLRLPATLVFDYPTPTVLAGRL
SEQ ID NO: 8
EPLAIVGMACRLPGGVSSPEDLWRLVESGTDAITDFPTDRGWDTDDLFDPDPDTPGKTYTVHGGFLDDVAGFDASFF
GISPREAQAMDPQQRLVLEAAWEAFERAGIEPGSVRGSDTGVFMGAYPGGYGIGVDLGGFGATAGAGSVLSGRLSYF
FGLEGPAMTVDTACSSSLVALHQAGSALRQGECSLALVGGVTVIANPQIFVEFSRQRGLAADGRCKAFADSADGTGW
SEGVGVLLVERLSDAQARGHNILAVVRGSAVNQDGASNGLTAPNGPSQQRVIRQALANAGLAGAEVDVVEAHGTGTT
LGDPIEAQAVIATYGQDRDQPVLLGSLKSNLGHTQAAAGVSGVIKMVMALQNGVVPRTLHADQPSRHIDWTAGAVEL
VTENQPWPELGRPRRAAVSAFGVSGTNAHVILESAPAQPVPPVDTPVSAVTAGVVPLPISARTVPALADLEDRLRAY
LTATPETDLPAVASTLATTRSVFEHRAVLLGEDTVTGTAIPDPRIVFVFSGQGSQRVGMGEELAAAFPLFARLHRQV
WDLLDVPDLDVDDTGYVQPALFALQVALFGLLESWGVRPQAVIGHSVGEVAAGYVAGVWSLEDACTLVSARARLMQA
LPAGGAMVAVPVSEEQARAVLVDGVEIAAVNGPASVVLSGDEAAVLRVAEGLGRWTRLSASHAFHSVRMEPMLEEFR
QVVSRLTYREPRIVMAAGEQVTTPEYWVRQVRETVRFGDQVAAFGDAVFLEIGPDRTLSRLIDGIAMLDGDDEVRAA
VAALAVMHVQGVGVDWPAILGTTTGRVLDLPTYAFQHERYWMANNGRPADLTPEALLKVVRDSAAMVLGHANADTVP
AATAFQELGLDSLIAVELRNSLAKATGLRLPATMVFDYPTPAALAGRL
SEQ ID NO: 9
EPLAIVGMACRLPGGVSSPEDLWRLVESGFDAITGFPTDRGWDVDNLYDPDPDAPGKSTTLHGGFLDDVAGFDASFF
GISPREAVAMDPQQRLAMEVSWEAFERAGIEPGSVRGSDTGVFMGAYPGGYGIGAELGGFMLTGRAGSVLAGRVSYF
FGLEGPAMTVDTACSSSLVALHQAAYALRQGECSLALVGGVTVMPTPVMFVEFSQQQNLADDGRCKAFADSADGTGW
SEGVGVLLVERLSDAQARGHNILAVVRGSAVNQDGASNGLTAPNGPSQQRVIRSALTSAGLTTADVDVVEAHGTGTT
LGDPIEAQAVLATYGQDRDQPVLLGSLKSNLGHTQAAAGVSGVIKMVMALQNGVVPRTLHVEEPSRHVDWTAGAVEL
VTENQSWPETGRARRAAVSSFGFSGTNAHVILESAPAQPVPPMDTPAPTVTTGVVPLPISAKSLPALADLEDQLRAY
LTATPETDLPAVASTLAMTRSVFEHRAVLLGEETVTGTAIPDPRIVFVFSGQGSQRVGMGEELAAAFPLFARLHRQV
WDLLDVPDLDVDDTGYVQPALFALQVALFGLLESWGVRPQAVIGHSVGEVAAGYVAGVWSLEDACTLVSARARLMQA
LPAGGAMVAVPVSEEQARAALVDGVEIAAVNGPASVVLSGDEAAVLRVAEGLGRWTRLSASHAFHSVRMEPMLEEFG
QVASELTYQEPRIVMAAGEQVTTPEYWVRQVRDTVRFGDQVAAFGDAVFLEIGPDRTLSRLIDGIAMLDGDDEVRAA
VAALAELHVQGVPIDWPAILGTTTGRVLDLPTYAFQHQRYWAASTWLAGLAPEEREGALMKVVRDTAAVVLGHADAG
TIPVTAAFKDLGLDSLTAVELRNSLAKSTGLRLPATMVFDYPTPASLAARLD
SEQ ID NO: 10
EPLAIVGMACRLPGGVESPEDLWRLVESGTDAISGFPADRGWADLSLRGGFLGDAAHFDAAFFGISPREALAMDPQQ
RLILEASWEAFERAGIEPGSVRGSDTGVFMGAFSGGYGAGADLAGFGVTAGAVSVLSGRVSYLFGLEGPAVTVDTAC
SSSLVALHQAGHALRQGECSLALVGGVTVMPTPDIFVEFSRQGGLASDGRCKAFADAADGTSWSEGAGVLVVERLSD
AERRGHTVLALVRGSAVNQDGASNGLTAPNGPSQQRVIQAALANAGLTPHEVDVVEAHGTGTRLGDPIEAQAVIATY
GRDREHPLLLGSLKSNVGHTQAASGVSGLIKMVMALRRGTVPRTLHVDEPSRHVDWTAGAVQLAIENQPWPETGRPR
RAAVSSFGVSGTNAHVILEGVPEEPADSEEPAGLTPLLISAKTPAALAEFEDRLRARLTTEPNLSAVASTLVRTRSL
FDHRAVLLDGETVSGMAEPDPRVVFVFSGQGSQRAGMGDDLAAAFPVFAKIRQQVWDLLDIPDLPVDETGHAQPALF
ALQVALFGLLDSWGVRPDALVGHSIGELAAGYVAGIWSLEDACALVSARARLMETLPPGGVMVAVPVSEEQARAVLT
DGVEIAAVNGPASVVLSGEETAVLQAAAALGGRSKRLATSHAFHSARMEPMLDEFRAVAEQLTYGSPRIPMAVGDGP
DYWVRQVRDTVRFGEQVAAHDGAIFVELGPDGSLARLVDGIAVLDREDEPRAALTALARLHVRGVKVDWPIAAGRRE
LDLPTYPFQRQRYWAETPTARRAPTDLLTLVRDTTATVLGYPDNTAVTPTTAFTDLGIDSLTAIELRNNMATTTGLR
LPATLVFDYPTPATLAARLD
SEQ ID NO: 11
EPLAIIGMACRLPGGVTTPEDLWQLVETGTDAISGFPTDRGWDVESLYDPDPDAAGKSYCVEGGFLDAVADFDASFF
GISPREALAMDPQQRLILETSWEAFERAGIDPADARGSDTGVFMGAFTSGYGADLEGFGGTAGALSVLSGRVSYFFG
LEGPAATVDTACSSSLVALHQAGYSLRHGECSLALVGGVTVMATPRTFVEFSRQRGLASDGRCKAFGDTADGTGWSE
GVGVLLVERLSDAERNGHRVLAVVRSSAVNQDGASNGLTAPNGPSQQRVIQAALDNAGLAPQDVDVVEAHGTGTTLG
DPIEAQAVIATYGQNREQPLLLGSLKSNVGHTQAAAGVSGVIKMIMALRHGVVPRTLHVDEPSRHVDWTAGAVHLVR
ENQPWPDVDRPRRAGVSSFGVSGTNAHIILESPPSQPAPEPAPALSPLVISAKTPQALAAYEDRLRTYLTAAPSTDA
RALAVTRSLFEHRAVLLGEDTVTGTALTEPRVVFVFPGQGWQWLGMGAALMESVVFAERMAECAAALSEFVDWNLIT
VLNDPAVIDQVDVVQPACWAVMVSLAAVWQAAGVRPDAVIGHSQGEIAAACVAGAISLRDAARIVALRSRLISERLG
KGAMASITLPADQITLAEGAWIAAYNGPTSTVVAGTPQAIEQMHGERVRRIAVDYASHTPHVEQIRAELLDLTTDVS
SQTPTLPWYSTVDGTWIDSPLDGDYWYRNLRQPVGFHPAVQTLQALGETVFVEVSASPVLLPAMDDAVTIATLRRDE
GTLTRMHTALAEAHVLGVTIDWPTVLGVTTRHVDLPTYAFQRQRYWVAELASLGPAERERALRKLVSDTAAGILGHA
DSGTVPVTAAFRELGVDSLTAVELRNGLAKATGLRLPATMVFDYPTPQALADRL
SEQ ID NO: 12
EPLAIVGMACRLPGGVSSPEDLWRLVESGTDAIADFPADRGWDVESLYDPDPDAAGKSYCVRGGFLAAAAEFDAAFF
GISPREALAMDPQQRLVLETSWEAFERAGIEPGSVRGSDTGVFMGAFAGGYGAAVEGFGATAGATSVLSGRVSYFFG
LQGPAITVDTACSSSLVALHQAGYSLRQGECSMALVGGVTVMATPQSFVEFSRQRGLAPDGRCKAFADTADGTGWSE
GVGVLLVERLSDAERNGHRVLAVVRSSAVNQDGASNGLSAPNGPAQQRVIRQALANAGLAAADVDVVEAHGTGTTLG
DPIEAQAVLATYGQDRERPLLLGSLKSNVGHTQAAAGVSGVIKMVMALRHGVVPRTLHVDEPSRHVDWTAGAVHLVT
ENQPWPDTDRPRRAGVSSFGVSGTNAHVIIEGSPTSSPVAEPSGDVLPLVVSAKTPQALTAYEDRLRAFLAAAPVTD
TRAVASTLAVTRSLFEHRAVLVGDNTVTGTALAEPRVVFVFPGQGWQWLGMGAALMESVVFAERMAECAAALGEFVD
WDLLAVLDDSAVVDRVDVVQPACWAVMVSLAAVWQDAGVRPDAVIGHSQGEIAAACVAGAISLRDAARIVALRSRLI
SERLGKGAMASITLPADQITLAEGAWIAAYNGPASTVVAGTPDAIEQMQGDRVRRIAVDYASHTPHVEQIRAELLDL
TAEVGSRTPTVPWYSTVDGTWIDSPLDGEYWYRNLRQPVGFHPAVQTLQALGETVFVEVSASPVLLPAMDDAVTVAT
LRRDEGTLTRMHTALAESHVLGVSIDWPHVLGDTGERMLDLPTYAFERHRYWSTARRNPSIAPDDLLTVVRDSAAVV
LGYADGGAVPVTGAFKDLGIDSLTAVELRNGLAKATGLRLPATVAFDYPTPQALAARL
SEQ ID NO: 13
EPLAIVGMACRLPGGVSSPEDLWRLVESGTDAITGFPADRGWAEYSFQGGFLDDAADFDAAFFGISPREALAMDPQQ
RLVLETAWEAFERAGIEPGSLRGSDTGVFMGAYPGGYGIGADRAGFGATAGAGSVLSGRVSYFFGLEGPAVTVDTAC
SSSLVALHQAGHALRLGECSLALVGGVTVMATPDTFVEFSRQGGLAADGRSKAFADSADGAGFAEGAGVLLVERLSD
AQRHGHQVLALVRGSAVNQDGASNGLTAPNGPSQQRVIQAALDNAGLTAAEVDVVEAHGTGTTLGDPIEAQAVIAAY
GQGRGEPLLLGSIKSNVGHTQAAAGVSGVIKVVMALRHGVVPRTLHVDEPSRHVDWTAGAVRLATENQSWPETGRPR
RAGVSSFGISGTNAHVILEGVPEEPAGHEEPAGLTPLLISAKTPAALAEFEDRLRAYLTTEPSLPAVASTLARTRSL
FDHRAVVLDGDVVRGVAEPDRRVVFVFSGQGSQRAGMGDDLAAAFPVFAKIRQQVWDQLDIPDLPVDQTGYAQPALF
ALQVALFGLLDSWGVRPDALVGHSIGELAAGYVAGIWSLEDACALVSARARLMQALPPGGVMVAVPVSEQQARGALT
DGVEIAAVNGPASVVLSGDEAAVLRAAAALGGRSKRLATSHAFHSARMEPMLDEFRMVAERLSYGSPRISMAVGDGP
DYWVRQVREAVRFGEQVAAHDGAVFVELGPDGSLARLIDGIAMLDRDDEPRAALTALARLHVQGVKVDWPIGAGRRV
DLPTYPFQRQRYWIDRPTARRAPTDLLTLVRDTAATVLGYPDSSAVPATTAFKDLGVDSLTAIELRNGMATTTGLRL
PATLVFDYPTPAALAARL
SEQ ID NO: 14
EPLAIVGMACRLPGGVSSPEDLWRLVESGTDAISGFPTDRGWAEHSFQGGFLDGAGDFDAPFFGISPREARVMDPQQ
RLVLEASWEAFERAGIEPGTVRGSDTGVFMGAYSGGYAAGADLAGFAATAGAGSVLSGRVSYFFGLEGPAVTVDTAC
SSSLVALHQAGHALRQGECSLALVGGVTVMATPDLFVEFARQQGLAADGRCKAFADNADGTGWSEGVGVLLVERLSD
AERNGHRVLAVVRSSAVNQDGASNGLTAPNGPSQQRVIQAALDNAGLTPADIDVVEAHGTGTTLGDPIEAQAVIATY
GQTREQPLLLGSLKSNVGHTQAAAGVSGVIKMVMALRHGVVPRTLHVDEPSRHVDWTAGAVQLAVENQPWPNTGRPR
RAGVSAFGVSGTNAHVIIEGSPTPSPVAEPSGDVLPLVISAKTPQALTAYEDRLRTYLNATPEIDTRAVASTLAVTR
SLFEHRAVLLGDNTVSGTALTEPRVVFVFPGQGWQWLGMGAALMESVVFAERMAECAAALSEFVDWNLITVLNDPAV
VDQVDVVQPACWAVMVSLAAVWQDAGVRPAAVIGHSQGEIAAACVAGAISLRDAARIVALRSRLIGERLGRGAMASV
ALPADEIALVDEVWVAAYNGPASTVIAGAPDAIEQMLGDRVRRIAVDYASHTPQVEQIRAELLDLTAEVSSQAPTVP
WYSTVDGTWIDGPLDSDYWYRNLRQPVGFHPAVEALGGLGETVFVEVSASPVLLPAMDDAVTVATLRRDEGTLTRMH
TALAEAHVLGVTIDWPAVVGDTGERMLDLPTYAFQHHRYWTTATARLEGRTGAEKHRLLLDIVLANAATVLGHDTAD
TIASDKPFKDLGIDSLTAVELRNSLARATELRLPATTAFDYPTPEALATRL
SEQ ID NO: 15
EPLAIVGMACRLPGGVSSPEDLWRLVESGTDAITGFPADRGWPDDSRQGGFLDDAADFDAAFFGISPREALAMDPQQ
RLVLEAAWEAFERAGIEPGSLRGSDTGVFMGAYPGGYGIGADQAGFGTTAGAGSVLSGRVSYLFGLEGPAVTVDTAC
SSSLVALHQAGHALRLGECSLALVGGVTVMGTPDIFAEFSRQGGLASDGRCKPFADAADGTGWAEGVGVLLVERLSD
AERHGHQVLAVVRGSAVNQDGASNGLTAPNGPSQQRVIQSALIQAGLAPHEVDVVEAHGTGTTLGDPIEAQAVIAAY
GQDRAQPLLLGSIKSNVGHTQAAAGVSGVIKMVMALRHGVVPRTLHVDEPSRHVDWSAGAVRLATESQPWPDTGHPR
RAGVSSFGISGTNAHVILEGVPEEPADTGEPSGLVPLLLSAKTPAALTHLEDRLRAYLTTEPNLPAVASTLAQTRSL
FDHRAVLLDGDVVRGVAEPDRRVVFVFSGQGSQRAGMGDDLAAAFPVFAKIRQQVWDLLDIPDLPVDETGHAQPALF
ALQVALFGLLDSWGVRPDALVGHSIGELAAGYVAGIWSLEDACALVSARARLMQALPPGGVMVAVSVSEEQARAVLT
DGVEIAAVNGPASVVLSGEETAVLQAAAALGGRSKRLATSHAFHSARMEPMLDEFRMVAERLSYGSPQIPMAVGDGP
DYWVRQVRETVRFGEQVAAHDGGIFVELGPDGSLARLVDGIAVLDRDDEPRAALTALARLHVQGVKVDWPIAAGRRV
LDLPTYPFQHQRYWATRPAARRAPTDLLTLVRDTAATVLGYPDSSAVPATTAFKDLGVDSLTAVELRNNLATSTGLR
LPATLVFDYPTPATLAARLD
SEQ ID NO: 16
EPLAIVGMACRLPGGVSTPEDLWQLVESGTDAISGFPADRGWDDYPYQGGFLTTAADFDAAFFGISPREALAMDPQQ
RLILEASWEAFERAGINPADARGSDTGVFMGAFSAGYGDDRDDSPATAGAVSVLSGRVSYFFGLEGPAMTVDTACSS
SLVALHQAGYSLRHGECSMALVGGVTVMATPRTFVEFARQGGLAEDGRCKAFADTADGTGWAEGVGVLLVERLSDAE
RNGHRVLAVVRSSAVNQDGASNGLTAPNGPSQQRVIQAALDNAGLAPQDVDVVEAHGTGTTLGDPIEAQAVIATYGQ
NRQQPLLLGSIKSNVGHTQAAAGVSGIIKMIMALRHGVVPRTLHVDEPSRHVDWTAGAVRLVTENQPWPDADRPRRA
GVSSFGISGTNAHIILEGVPEEPAQPDESPELTPLVISAKTAPALTQFEARLRSYLTTEPALSAVASTLAQTRSLFD
HRAVLLGGDTITGVAEPSPRVVFVFSGQGSQRAGMGDELAAAFPVFAKIRQQVWDLLDIPDLPVDETGHAQPALFAL
QVALFGLLDSWGVRPDALIGHSIGELAAGYVSGIWSLEDACALVSARARLMQASPPGGAMVAVPVSEQQARAVLTDG
VELAAVNGPSSVVLSGDETAVLQAAAALGGRSKRLATSHAFHSARMEPMLDEFRAVAEQLSYRSPQIPMAVGDGPEY
WVRQVRDTVRFGEQVAAHDGAIFVELGPDGSLVRLIDGIPMLDRDDEPRAALTALARLHVRGVNVAWPIAADRRELD
LPTYPFQRERYWSTASLSALAPAEREQALRKVVSDSSAMVLGYAEGRAVAPTAAFKDLGVDSLTAVELRNSLTKATG
LRLPATIVFDYPTPGALAVRL
SEQ ID NO: 17
EPLAIVGMACRLPGGVSSPEDLWRLVESGTDAISRFPADRGWDVDGLYDPDPDAPGKSYSVEGGFLDAVADFDAAFF
GISPREALAMDPQQRLILEASWEAFERAGIEPGSLRGSDTGVFMGAYSSGYGIGADIPGLGVTAGAVSVVSGRVSYF
FGLEGPAVTVDTACSSSLVALHQAGHALRRRECSLALVGGVTVMATPFGFVEFSRQRGLASDGRCKAFADTADGTSW
SEGAGVLVVERLSDAERHGHQVLAVVRGSAVNQDGASNGLTAPNGPSQQRVIQAALANAGLTPHEVDVVEAHGTGTR
LGDPIEAQAVIATYGQARGEPLLLGSIKSNVGHTQAAAGVSGVIKMVMALRHGVVPRTLHVDEPTRHVDWTTGAVRL
ATENQPWPETERPRRAGVSSFGVSGTNAHIILEGVAAEPAQPGESPELTPLLLSAKTPAALTHLEDRLRAYLTTEPN
LPAVASTLAQTRSLFDHRAVLLGGETVTGVAEPDPRVVFVFSGQGSQRAGMGDDLAAAFPAFAKIRQQVWDQLDIPN
LPVDETGHAQPALFALQVALFGLLDSWGVRPDALVGHSIGELAAGYVAGIWSLEDACALVSARARLMQALPPGGVMV
AVSVSEEQARAVLTDGVEIAAVNGPASVVLSGEETAVLQAAAALGGRSKRLATSHAFHSARMEPMLDEFRAVAEQLS
YGSPRIPMAVGDGPDYWVRQVRDTVRFGEQVAAHDGAIFVELGPDGSLARLIDGIAVLDRDDEPRAALTALARLHVR
GVKVDWPIAAGRRELDLPTYPFQHQRYWIDSRPTARRAPTDLLTLVRDTTATVLGYPDNTAVTPTTAFTDLGIDSLT
AIELRNNMATTTGLRLPATLVFDYPTPATLAARLD
SEQ ID NO: 18
EPLAIIGMACRLPGGVTTPEDLWQLVETGTDAISALPTDRGWADHPYQGGFLTTAADFDAAFFGISPREALAMDPQQ
RLILETSWEAFERAGINPADAHGSDTGVFMGAYSGGYGIGADLAGFGATAGATSVLSGRVSYFFGLEGPAITVDTAC
SSSLVALHQAGHALRHGECSLALVGGVTVMATPDIFVEFARQRGLAADGRCKAFADTADGTGWAEGVGVLLVERLSD
AERNGHRVLAVVRSSAVNQDGASNGLTAPNGPSQQRVIQAALDNAGLTPADIDVVEAHGTGTTLGDPIEAQALIATY
GQNREQPLLLGSLKSNIGHTQAAAGVSGVIKMVMALQHGVVPRTLHVDKPSRHVDWTAGAVRLLTESQPWPDTDRPR
RAGVSSFGVSGTNAHVIIEGSPTPSPVADPSGDVLPLVISAKTPAALAAYEDRLRTYLNATPEIDTRAVASTLAVTR
SLFEHRAVLLGEDTVSGTALTEPRVVFVFPGQGWQWLGMGAALMESVVFAERMTECATALSEFVDWNLITVLNDPAV
IDQVDVVQPACWAVMVSLAAVWQAAGVRPDAVIGHSQGEIAAACVAGAISLRDAARIVALRSRLISERLGKGAMASI
TLPADQITLAEGAWIAAYNGPTSTVVAGTPQAIEQMHGERVRRIAVDYASHTPHVEQIRAELLDLTTDVSSQTPTLP
WYSTVDGTWIDSPLDGDYWYRNLRQPVGFHPAVQTLQALGETVFVEVSASPVLLPAMDDAVTIATLRRDEGTLTRMH
TALAEAHVLGVTIDWPHVLGDTGERMLDLPTYAFQHHRYWTTAARLTGRTTAAQHRLMLDFVLGNVAAVLGHGSAGD
VAPDKPFKELGMDSLTSVELRNSLAKATGQRLPATIVFDHPTADALATYL
SEQ ID NO: 19
EPIAIVSMACRVPGGVTSPEGLWRLVESGTDAISEFPGDRGWDVANLYSPDPDAPGKSYSLQGGFLDGAAAFDASFF
GISPREALGMDPQQRLLLETSWEAVERARIDPKSLRGRDVGVYVGGAAQGYGLGAAEAQRDNLITGGSISLLSGRLS
YALGLEGPGLTVDTACSSSLVALHLAAQALRQGECSLALVSGVSVMPTPDVFVEFSRQRGLAADGRCKSFAAAADGT
SWSEGVGVLLLERLSDARRLGHEILAVVRGTAVNSDGASNGLTAPNGASQQRVIRQALASAGLGPADVDAVEAHGTG
TKLGDPIEAEAILATYGKDRPTPVWLGSLKSNIGHTMAASGVLGVIKMVESMRHGVLPRTLHVDEPSPHVDWAAGDV
ALLTSNQPWPAGRKPRRAGVSSFGLSGTNAHVVLEQYRMPAAPVTTKEAGPLPWVLSAQTPEALRERAGQLATALAG
DPAWHPLDVGYSLAATRSTFAHRAVVVGGDREFVRTLGKLADGAGWPGLTTGVAKSRRIAFMFDGQGTQRLAMGQGL
YARFPAFTRTWDTVSAEFAKHLDHTLTDVYLGGGGTAAAELVDDPLYAQAGIFAVEVALVELLAEWGVRPDVVTGHS
IGEAAAAYTAGMFSLADVTALITARGAALRSAPPGAMLALRAGEPEVRDFLDRTGAALDVAAVNGPAAVVVSGAPDA
VAGFASAWTASGRECRQLKVRRAFHSRHVEGVLGDFRTVLKSLTFRTPALPIVSTVTGRLIDPAEMGTPEYWLSQVR
QPVRFQDAVGELAGQGVSAFLEVGPSGTLASAGMECLDASFHALLRPRPAEDIGVLTALAELYAGGTAVDWATVLAG
GRPVDLPVYPFQHQSYWLRSAPDEPRTVLEMVHLEVASILGITDPDAVQDDSSFLELGFDSLSGVRLRNRLTQVTGL
TLPATLLFDHDTPSALATELD
SEQ ID NO: 20
EPLAVVGMACRLPGGITSPEELWELVEDGGDAVGDFPTDRGWDVAALHAAAESATSRAGALMGAADFDAAFFGISPR
EATALDPQQRILLEIAWEAIERAGIKADVLRGTDTGVFVGGFYYGYGAGADLGGFGAYSTQPAVLAGRLSYFFGLEG
PAVTVDTACSSSLVALHQAGQALRAGECSLALVGGVTVMASPQSFVEFSRQGGVAPDGRCKAFADAADGTGFAEGAG
VLVVERLSDAERNGHTVLAVVRGSAVNQDGASNGISAPNGPAQQRVIRQALGSAGLAPADVDVVEAHGTGTVLGDPI
EAQAVLATYGQGREVPLLLGSLKSNIGHAQAAAGVAGVIKMVMAMRRGVVPRTLHVDEPSSHVDWTTGAVELLTEAR
PWPESDRPRRAGVSAFGVSGTNAHVILEEVAESSVRSGGSSGLVPLPVSARTESSLAVQVERLGAYVRSGADLSAVA
DGLVRERVVFGHRAVLLGESTVAGVAEGELRTVFVFPGQGSQWVGMGRELMGASEVFAARMRECAAALEPHTGWDLL
DVLGEAVVADRVEVLQPASWAVAVSLAALWQAHGGTPDAVIGHSQGEIAAASVAGALSLEDAARIVALRSQTIAARL
GRGAMASIAIPSAEVEVMEGVWVAARNGPSSTVIAGDPAAVEQVLARYEAEGVRVRRIAVDYASHTPHVEAIQDELA
EVLEGVTAQVPTIPWWSTVDSDWVTEPVDDDYWYRNLRQPVAMDTAIGELDGSLFIECSAHPVLLPALDQERTVASL
RTDDGGWERFLTALAEAWTQGADVDWTILVEPAPHRLDLPTYPFDHKRYWLLERLGAMTGADRDAALLTLVRDCAAA
VLGHVDAAGVPADAAFKDLGVDSLTAVELRNRLAAATGVRLPATLAFDHPTPRAIASRLD
SEQ ID NO: 21
EPLAIVGMACRLPGGVASPGDLWQMLDSGGDAVTGFPVDRGWDPSGLTGGPDADRGGFLSDAADFDAAFFGISPREA
LAMDPQQRILLETTWEAFENAGIVPGTLRGSDTGVFMGAFSYGYGVGADLGGFGSIGVQPSVLTGRISYFYGLQGPA
FTVDTACSSSLVALHQAGHALRHGECSLALVGGVTVMANPDGFVEFEQQGGLSPDGRCRAFADAANGTGWAEGAGVL
VVERLSDAERNGHTVLAVVRGSAVNQDGASNGLSAPNGPSQQRVIRQALANAGLGAADVDVVEAHGTGTVLGDPIEA
QAVLATYGQGREVPLLLGSLKSNIGHAQAAAGVAGVIKMVMAMRRGVVPRTLHVDEPSSHVDWTAGAVEVVTEARPW
PESGRVPRAGVSSFGVSGTNAHVVLEGAPEPSSGAEASSGGGLVPLPVSARTESSLAVQVERLGAYVRGGADLGAVA
DGLVRGRAVFDRRAVLLGESTVAGVAVEGARTVFVFPGQGSQWVGMGRELMGVSEVFAARMRECAAALEPYTGWDVL
DVLGEAVVADRVEVLQPASWAVAVSLAALWQAHGVVPDAVVGHSQGEIAAACVAGALSLEDAARVVALRSQTIAARL
GHGAMASIALPASAVEVMEGVWIAARNGPESTVVAGDPAAVERVLARYEAAGVRVRRIAVDYASHTPHVEAIQDELA
DVLGGITSSAPDISWWSTVDSGWVTEAVGDDYWYRNLRQPVAMDTAVSELDGSLFIECSAHPVLLPALDQERTVASL
RTDDGGWDRFLTALAQAWTQGADVDWTTLIEPAQHRLDLPTYPFDHKRYWLQPAGARNEVARHTDLLTLVRQKAAAL
LGHAGPEDVPEDAAFRQLGVDSLIAVQLRNGLNEATGLRLSATLVFDYPTPRALAGRI
SEQ ID NO: 22
EPVAIVGMACRLPGGVTSPEDLWRLVASGTDAITEFPADRGWDVDALFDPDPDAVGRSTTRHGGFLTEATGFDAAFF
GISPNEALAMDPQQRLVLETSWEAFEHAGIVPDTLRESDTGVFMGAFHQGYGAGRDLGGLGVTATQTSVLSGRLSYF
YGLQGPAVTVDTACSSSLVALHQAAQALRSGECSLALAGGVTVMATPGSFVEFSRQRGLSPDGRCKAFADSADGTGF
AEGVGVLVVERLSDAERNGHTVLAVVRGSAVNQDGASNGLSAPNGVAQQRVIRQALANAGLNGTDVDAVEAHGTGTV
LGDPIEAQAVLATYGQEREVPLLLGSVKSNVGHTQAAAGVAGVIKMVMAMRRGVVPRTLHVDESSSHVDWSAGAVEV
VTEARPWPESGGARRAGVSSFGVSGTNAHVILEGVAESSVRSGGSSAGLVPLPVSARTESSLALQVERLGEYVRGGA
DLGAVADGLVRGRAVFGRRAVLLGESTVAGVAVEGARTVFVFPGQGSQWVGMGRELMGVSEVFAARMRECAAALEPH
TGWDVLDVLGEAVVADRVEVLQPASWAVAVSLAALWQAHGVVPDAVVGHSQGEIAAACVAGALSLEDAARVVALRSQ
TIAARLGHGAMASIALPASAVEVMEGVWIAARNGPESTVVAGDPAAVERVLARYEAAGVRVRRIAVDYASHTPHVEA
IQDELADVLGGITSSAPSVPWWSTVDSGWVTEPVDDDYWYRNLRQPVAMDTATGELDGSLFIECSAHPVLLPALDQE
RTVASLRTDDGGWERFLTALAEAWTQGADVDWTTLIEPAQHRVDLPTYPFDHKRYWLQPARRTVRTGEDSGRDLLAV
VCGATAAVLGHADASEIGPATAFKDLGIDSLSGIRLRNSLAETTGVRLSATAVFDHPTPDALAARL
SEQ ID NO: 23
EPLAIVAMACRMPGGVDTPEDLWRLVESGGDAITEFPTDRGWDLAALYDPDPDAIGKVSVRHGGFLAGAADFDAEFF
GISPREALAMDPQQRLILEVSWEAFERAGILPASVRGSDAGVFMGAFTQGYGAGVDLGGFGATGTPTSVLSGRLSYY
FGLEGPSVTVDTACSSSLVALHQAARSLRSGECSLALVGGVTVMATTTGFVEFSRQRGLAPDGRAKAFADTADGTSF
AEGAGVLIVERLSDATRLGHPVLAVVRGSAVNSDGASNGLSAPNGPAQRRVIERALDDAGLVPGDIDAVEAHGTGTR
LGDPIEAQALEAAYGLDRVHPLLIGSLKSNLGHTQAAAGVAGVIKMVLAMRHGVLPRTLHVDEPSRHVDWGGGVRLL
RRNEPWPVTGRVRRAGVSSFGISGANAHVVIEAGPPAAPATLPATEPVPEGVVWPVSARTPDGVRDVAGRLVALTAP
AAAIGHSLATTRTAMRHRAVVPARDAEAFARGEEVPGVVRGTADVTDARAVFVFPGQGSQWDGMGAELLATEPVFAR
RLGECAEALAPYTGWDLLDVIARRPGAPALDRVDVVQPVSFAMMVALAELWRSRGVAPAAVVGHSQGEVAAACVAGV
LTLDDAAKVVALRSRLVATELGHGGMVSVPPADFDAAAWAGRLEVAAVNGPASIVVAGAADAVEELLAATPHARRIA
VDYASHTAHVETIRDALLDALADLTPGAPEVPFFSTVDEAWLDRPADAAYWYDNVRRPVRFGAATARLAELGYRVFV
EASPHPVLTTALADTLAGHPNTAVTGTLRRGDGGARRFTSSLAELWVRGVPVSWPSGESRRVPLPTYPFRRDRYWID
AEAAPTAARDMLELVRTSAALVLGHRDAHAIEPTRAFKEVGFDSLTGVELRNRLADATGLTLPATLVFDHPTAQALA
AHLD
SEQ ID NO: 24
EPLAIVGMACRLPGGVASPEDLWRLLESGGDGITTFPGDRGWDVEALYDPDPEHPGTSTVRHGGFLSGAGDFDAGFF
GISPREAVAMDPQQRVVMETSWEALEYAGIDPHTLRGSDTGVFMGGYFYGYGSGADRGGFGATSTQTSVLSGRLSYF
YGLEGPAVTVDTACSSSLVALHQAGQSLRTGECSLALVGGVTVMASPSGFVDFSQQRGLAPDGRCKAFAEAADGTGF
AEGSGVLVVERLSDAERHGHRVLAVVRGSAVNQDGASNGLSAPNGPSQERVIRQALANAGLQPSDVDAVEAHGTGTR
LGDPIEATALLATYGQDRATPLLLGSLKSNIGHTQAAAGVAGIIKMVLAMHHDTLPSTLHVDTPSSHVDWTAGTVEL
LTDARPWPETSRPHRAAVSSFGVSGTNAHVILESHPRPTPAPDTGSSTHPVPLLISARTPRALSEHTTRVSAFLDAG
GGDERAVASALLTRTAFTHRAALIGTDLITGTAVPDRRLVWLFSGQGSQRPGMGDELAAAYDVFARTRRDVLDALQV
PAGLDIHDTGYAQPAVFALQVALSAQLDAWGVRPDALVGHSIGELAAAYVAGVWSLDDACALVSARARLMQALPPGG
AMAAVIASERDALPLLREGVEIAAVNGPASIVLSGDEDAVLDVAARLGRFTRLRTSHAFHSARMEPMLDEFRDVAQR
LTYHEPKLPMAAGADCATPEYWVRQVRDTVRFGEQVAAYDGAALLEIGPDRNLARLVDGIPVLHGDDEARSAMTALA
RLHTGGVAVDWPEVIGAAPTHLNLPTYPFERTRYWLGSRDRIAGLTAADAEKAALAVVRECAAAVLGHEGPARIEAT
ATFKELGVDSLTAVRLRNAFTEATGVRLPATAVFDFPTPQAVAAKL
SEQ ID NO: 25
EPLAIVGMACRLPGGVASPEDLWRLLESGGDGITAFPADRGWDVEALYDPDPEHPGTSTVRHGGFLSGAGDFDAGFF
GISPREAIAMDPQQRVVLETSWEALEQAGIVPGTLRGSDTGVFMGAFSDGYGLGTDLGGFGATGTQTSVLSGRLSYF
YGLEGPAVTVDTACSSSLVALHQAGQSLRTGECSLALVGGVTVMASPGGFVEFSQQRGLAPDGRCKAFAEAADGTAF
AEGSGVLVVERLSDAERRGHRILAVVRGSAVNQDGASNGLSAPNGPSQERVIRQALANAGLRPSDVDAVEAHGTGTR
LGDPIEATALLATYGQDRATPLLLGSLKSNIGHTQAAAGVAGIIKMVLAMRHGSLPRTLYVDTPSSHVDWTAGGVEL
LTDARPWPATTGPRRAAVSSFGVSGTNAHVILEAHAAPEPPALDSPVVEPSASLFATELTPLPVSARTSEAVDGQVQ
RLREHLATHPGDDPRAVAAALLATRTDFPHRAVLLGDGVVTGTALTAPRTVFVFPGQGSQWLGMGRKLMAESPVFAA
RMRQCADALAEHTGRDLIAMLDDPAVKSRVDVVHPVCWAVMVSLAAVWEAAGVRPDAVIGHSQGEIAAACVAGAISL
EDGARLVALRSALLVELAGRGAMGSIAFAAADVEAAAARIDGVWVAGRNGTATTIVSGRPDAVETLIADYETRGVWV
TRLVVDCPTHTPFVDPLYDELQRIVAATTSRAPEIPWFSTADERWIDAPLDDEYWFRNMRNPVGFAAAVAAAREPGD
TVFIEVSAHPVLLPAINGTTVGTLRRGGGADRLLDSLAKAHTVGVAVDWAAHDAATGTADLPTYAFHHERYWIEPAE
RLPDLSRKEQEQVLLDVVRDTAATLLGHADARAVTATAAFKDLGVDSLTALGLRDRLAEALGIPLPATLVFDHPAAG
TLSRHL
SEQ ID NO: 26
EPLAIVGMACRLPGGVASPDDLWRLLESGGDGIGAFPGDRGWETGADGRGGFLSGAAGFDAAFFGVSPREALAMDPQ
QRVVLETSWEALEHAGIDPHTLNGSDTGVFLGAFFQGYGIGADFDGYGTTSIHTSVLSGRLSYFYGLEGPAVTVDTA
CSSSLVALHQAGQSLRTGECSLALVGGVTVMASPAGFADFSEQGGLAPDGRCKAFAEAADGTAFSEGSGVLVVERLS
DAERHGHRILAVVRGSAVNQDGASNGLSAPNGPSQERVIRQALANAGLQPSDVDAVEAHGTGTRLGDPIEATALLAT
YGQHRTTPLLLGSLKSNIGHTQAAAGVAGIIKMVLAMHHDTLPPTLHVDTPSSHVDWTTGGVELLTDARPWPTTTGP
RRAGISSFGVSGTNAHVILESPTPVPSPGAEPGARPVPLPISARTPEALDEHTIRIRAFLDDNPGADHVAVAQTLAR
RTPFEHRAVLLGDTLITADPNAGSGPVVFVYSGQSTLHPHTGRQLAATYPVFADAWGEVLGHLDADQGPATHFAHQI
ALTALLRSWGIAPHAVIGHSLGEISAACAAGVLSLGDASALLAARSRLMDELPAGGAMVTVLTSEENALRALRPGVE
IAAVNGPHSVVLSGDEGPVLAVAQQLGIHHRLPTRHAGHSARMDPLVAPLLEAASGLTYHQPRIAIPGDPTTAAYWA
RQVRDQVRFQAHAERYPGATFLEIGPNQDLSPVVDGIPTQTGTPDEVQALHTALARLHTRGGVVDWPTVLGGDRAPV
ALPTYPFQHKDYWLRATELAVLPDDERADALLAFVRNSTATVLGHLGAEDIPATATFKELGIDSLTAVQLRNALTTA
TGVRLNATAVFDFPTPRALAARL
SEQ ID NO: 27
EPLAIVGMACRLPGGVASPEGLWRLVASGTDAITEFPADRGWDVDALYDPDPAIGKTFVRHGGFLDGATGFDAGFFG
ISPREALAMDPQQRVLLETSWEAFESAGITPDSARGSDTGVFIGAFSYGYGTGADTNGFGATGSQTSVLSGRLSYFY
GLEGPSVTVDTACSSSLVALHQAGQSLRSGECSLALVGGVTVMASPGGFVEFSRQRGLAPDGRAKAFGAGADGTSFA
EGAGALVVERLSDAERHGHTVLAVVRGSAVNSDGASNGLSAPNGPSQERVIRQALANAKLTPADVDAVEAHGTGTRL
GDPIEAQALLATYGQDRATPLLLGSLKSNIGHAQAASGVAGIIKMVQAIRHGELPPTLHADEPSPHVDWTAGAVELL
TSARPWPGTGRPRRAAVSSFGVSGTNAHIILEAGPVKAGPVEAGPVPAAPPSAPGEDLPLLVSARSPEALDEQIGRL
RTYLDTRPGVDRAAVAQTLARRTHFAHRAVLLGDTVITTSPSHQADELVFVYSGQGTQHPAMGEQLAAAFPVFAETW
HDALRRLDDPDPHDPTRSQHTLFAHQAALTALLRSWDITPHAVIGHSLGEITAAYAAGILSLDDACTLITTRARLMH
TLPPPGAMVTVLTGEEEARQALRPGVEIAAVNGAHSVVLSGDEDAVLDVAQRLGIHHRLPAPHAGHSAHMEPVAAEL
LATTRRLRYDRPHTAIPNDPTTAEYWAEQVRNPVLFHAHTQQYPDAVFVEIGPGQDLSPLVDGIALQNGPANEAHAL
RTALARLFSRGATLDWPLVLGGASRHDPDVPSYAFQQRPYWIESARLAELPDADRDTALSTLVMDATAAVLGHADAS
EIGPTTTFKDLGIDSLTAIELRNRLAEATGLRLSATMVFDHPTPRVLAAKL
SEQ ID NO: 28
EPLAIVGMACRLPGGVTSPEDLWRLVASGTDAITEFPTDRGWDIDRMFDPDPDAPGKTYVRHGGFLSEAAGFDAAFF
GISPREAWAMDPQQRVILETVWEAFENAGIVPDTLRGSDTGVFMGAFSHGYGAGVDLGGFGATATQNSVLSGRLSYF
FGMEGPAVTIDTACSSSMVALHQAAQSLRDGECSLALAGGVTVMPTPLGYVEFCRQRGLAPNGRAKAFAEGADGTSF
SEGAGVLVVERLSDAERNGHTVLALVRSSAVNQDGASNGISAPNGPSQQRVIRQALDKAGLTPADVDVVEAHGTGTP
LGDPIEAQAIIATYGQDRDTPLYLGSVKSNIGHTQTTAGLAGVIKMVMAMRHGLLPKTLHVDEPSSHVDWSAGAVEL
LTEARPWPDSDRPRRAGVSSLGISGTNAHVILEGVAESSVRSGGSSGLVPLPVSARTESSLALQVERVGEYVRGGAD
LGAVADGLVRGRAVFDRRAVLLGESTVAGVAVEGARTVFVFPGQGSQWVGMGRELMGASEVFAARMRECAAALEPHT
GWDVLDVLGEAVVADRVEVLQPASWAVAVSLAALWQAHGVVPDAVIGHSQGEIAAACVAGALSLEDAARVVALRSQT
IAARLGHGAMASIALPASAVEVAEGVWIAARNGPESTVVAGDPGAVERVLARYEAAGVRVRRIAVDYASHTPHVEAI
EEQLADVLGGITSSAPDISWWSTVDSGWVTEPVGDDYWYRNLRQPVAMDTAISELDGSLFIECSAHPVLLPALDQEH
TVASLRTDDGDWDRFLTALAQAWTQGAPVDWTTLIEPAPHRLDLPTYPFDHKRYWIEAAARLAGHTAAEQRRVMQEV
VLRQAAAVLAYGLGEQVAADRPFRDLGFDSLTAVDLRNRLAAETGLRLPTTVVFSHPTAEALATHL
SEQ ID NO: 29
EPIAIVAMACRLPGGVTSPEELWRLVESGTDAITMAPGDRGWDLDALYDPDPDAVGKAYNLRGGFLEGAAEFDAAFF
DISPRESLGMDPQQRLLLETAWEAIERGRINPASLHGREIGVYVGAAAQGYGLGAEDTEGNAITGGSTSLLSGRLAY
VLGLEGPSVTVDTACSSSLVALHLACQGLRLGECELALAGGVSVLSSPAAFVEFSRQRGLAADGRCKSFGSGADGTT
WAEGVGVLVLERLSDAERLGHTVLAVVRGSAVTSDGASNGLTAPNGLAQQRVIRKALAAAGLTAADVDLVEGHGTGT
RLGDPVEADALLATYGQNRQEPVWLGSLKSNIGHATAAAGVAGVIKTVQAIGAGTMPRTLHADEPSPAVDWTAGRVS
LLTGNRPWPDDERARRAAVSAFGLSGTNAHVILEQHRPEPVAPRPPREEPRPLPWVLSARTPAALRAQAARLRDHLA
AVPDADPLDIGYALATSRARFTHRAAVVATSSDEFRAGLDSVADGVEAPGVVGGTARERRVAFLFDGQGAQRVGMGR
ELHGRFPVFAAAWDEVSDAFGKHLEHSPTDVFHGEHGDLAHDTLYAQVGLFTLEVALLRLLEHWGVRPDVLVGHSVG
EVTAAYAAGVLTLADATALIVARGRALRALPPGAMTAVDGSPAEVGAFTGLDIAAVNGPSAVVLTGSPDDVTAFERE
WAAAGRRAKRLDVGHAFHSRHVDGALDDFRTVLESLSFGAARLPVVSTTTGRDAAGDLATPEHWLRHARRPVLFADA
VRELADLGVNMFVAVGPSGALASAASENTGGSAGTYHAVLRARTGEENAALTAVAELHAHGAPVDLAAVLAGGRPVD
LPVYPFQHRSYWLAPDDLTVAEIVRRRAAALLGIADPGDVDADTTFFALGFDSLAVQRLRNQLTAATGLDLPTAVLF
DHDTPSALTAYL
SEQ ID NO: 30
EPLAIVGMACRLPGGVSSPEDLWRLVESGTDAISGFPTDRGWDVENLYDPDPDASGKSYCVQGGFLDAAAGFDAGFF
GISPREALAMDPQQRLVLEVSWEAFERAGIEPGSVRGTDTGVFIGAYPGGYGAGAGTELEGYGTTSGPSVLSGRVSY
FFGLEGPAITVDTACSSSLVALHQAGYALRQGECSLALVGGVTVMATPDVFTEFARQRGLAADGRSKAFSDSADGAG
FSEGIGVLLVERLSDAQAKGHQVLAVVRSSAVNQDGASNGLTAPNGPSQQRVIQAALGNAGLTTAEVDVVEGHGTGT
TLGDPIEAQALLATYGQDRERPLLLGSLKSNIGHTQAAAGVSGVIKMVMALRHGLVPRTLHVDEPSSHVDWTAGAVE
LVTANQPWPDADRPRRAGVSSFGVSGTNAHVILESAPSTQAVDDVRPVETPVVGSELVPLVLSAKTLPALSGYEDRL
RAYLAGSPGVDLRAVASTLAVTRSVFEHRAVLLGDDTVTGTAVTDPRVVFIFPGQGSQRAGMGEELAAAFPVFARIH
QQVWDLLDVPDLEVNETGYAQPALFALQVALFGLLESWGVGPDAVVGHSVGELAAAYVSGVWSLEDACTLVSARARL
MQALPPGGVMVAVPVPEDEARAVLGEGVEIAAVNGPSSVVLSGDEAAVLRAAATLGKWMRLATSHAFHSARMEPMLD
EFRAVAERLTYQTPHLTMAAGEQVTTPDYWVRQVRDVVRFGEQVASFEDAVFVELGADRSLARLVDGVAMLHGAHEA
QAAISALAHLYVNGVTVDWPAVLGDVPGRVLDLPTYAFQHQRYWLEGWLAALTPAEREKALLKLVSDGAATVLGHAD
TSTIPVTGAFKDLGINSLTAVELRNSLAKATELRLPATLVFDYPTPATLAARLD
SEQ ID NO: 31
EPLAIVGMACRLPGGVSSPEDLWRLVESGTDAISGFPTDRGWDVENLDSAGKSYRAEGGFLDAAAGFDASFFGISPR
EALAMDPQQRLVLEVSWEAFERAGIEPGSLRGSDTGVFMGAYPGGYGIGADLGGFGATAGATSVLSGRVSYFFGLEG
PAFTVDTACSSSLVALHQAGYALRQGECSLALVGGVTVMATPQTFVEFSRQGGLASDGRCKAFADAADGTGWAEGVG
VLLVERLSDAQAKGHQVLAVVRSSAVNQDGASNGLTAPNGPSQQRVIQAALSNAGLTTAEVDVVEAHGTGTTLGDPI
EAQALLATYGQDRERPLLLGSVKSNLGHTQAAAGVSGVIKMVMALRHGLVPRTLHVDEPSRHVDWSTGAVELVTENQ
PWPETGRPRRAGVSSFGISGTNAHVILESAPSAQVVENTVVESAPEWVPLVVSARTQSALADYEDRLRAYLAGSPGV
DLRAVASTLAVTRSVFEHRAVLVGDDTVTGSAVSDPRVVFVFPGQGSQRAGMGEELAAAFPLFAQIHQQVWDLLDVP
DLEVNETGYAQPALFALQVALFGLLESWGVRPDAVIGHSVGELAAGYVCGVWSLEDACTMVSARARLMQALPAGGVM
VAVPVSEDEARAVLGEGVEIAAVNGPLSVILSGDEAAVLRAAATLGKWTRLATSHAFHSARMEPMLEKFRAVAEGLT
YRTPRLTMAAGDQVATAEYWVRQVRDVVRFGEQVASFEDAVFLELGADRSLARLVDGIAMLHGDHEAQAAISALAHL
YVNGMAVDWPAVLGDVRGRVLDLPTYAFEHQRYWLEGWLAVLAPAEREKALLKLVRDSAALVLGHADASTIPVAAAF
KDLGIDSLTAVELRNSLAKATGLRLPNTTVFDYPTPAILAARL
SEQ ID NO: 32
EPLAIVGMACRLPGGVSSPEDLWRLVESGTDAISGFPTDRGWDAESLYDADPDAPGKSYCVEGGFLDNASSFDAGFF
GISPREALAMDPQQRLVLEVSWEAFERAGIEPGSIRGTDTGVFMGAYAGGYGAGADLGGFAATASATSVLSGRVSYF
FGLEGPAITVDTACSSSLVALHQAGYALRQGECSLALVGGATVMATPQSFVEFSRQRGLASDGRCKAFADAADGTGW
AEGVGVLLVERLSDARRNGHQVLAVVRSSAVNQDGASNGLTAPNGPSQQRVIQAALSNAGLAAHEVDVVEAHGTGTT
LGDPIEAQAVLATYGQDRERPLLLGSLKSNIGHTQAASGVSGVIKMVMALQHHTVPRTLHVNEPSRHVDWSAGAVEL
VRENQSWPEGDRPRRAGVSSFGVSGTNAHIILESAPAQSAEEVQPVEVPVVASDVLPLVVSAKTHSALTEAEDRLRA
YLTASPEADMPAVASTLAVTRSVFEHRAVLLGDDTVTGTGTAMSDPRVVFVFPGQGWQWLGMGSALRESSVVFAERM
AECAAALSDFVDWDLFTVLDDPAVVDRVDVVQPASWAVMVSLAAVWQAAGVRPDAVIGHSQGEIAAACIAGAVSLRD
AARIVTLRSQAIARGPAGRGAMASIALPAQEIELADGAWIAAHNGPASTVIAGTPEAVDLVLTAHEAQGTRVRRITV
DYASHTPHVELIRDELLHITAGIGSQVPVVPWLSTVDGTWVEGPLDAEYWYRNLREPVGFAPAISQLQAQGETVFIE
VSASPVLLQAMDDDAVTVATLRRDDGDATRILTALAQAYTHGVTVDWPAILGTTTTRALDLPTYAFQHQRYWLNNRL
TGRTSVEQHRVMLELVLGEAASVLGHGSPDAIATDTSFKDLGMDSLTAIELRNRLMAETGLQLPATMVFDYPTANAL
ATHL
SEQ ID NO: 33
EPIAIVAMACRVPGGVSSPEGLWRLVESGTDVISGFPTDRGWDVEGLFDPDPDAPGKSYCVQGGFLDTAADFDAPFF
GISPREALGMDPQQRLLLETTWEAIERARIDPKSLRGRDVGVYVGGAAQGYGVGVDQQRDNGITGSSVSLLSGRVSY
ALGLEGPGVTVDTACSSSLVALHLASQALRQRECSLALVSGVSVMSSPAMFVEFSRQRGLSSDGRCKSFAASADGTI
WSEGVGVLVVERLSDARRLGHRFLAVVRGSAVNSDGASNGLTAPNGASQQRVIRQALAGAGLTASDVDVVEAHGTGT
KLGDPIEAEAILATYGQERSTPAWLGSLKSNIGHTMAASGVLGVIKMVEAMRHGSLPRTLHVDDPSPHVDWTSGSVA
LLTEHQPWPDDAKPRRAGVSSFGLSGTNAHVVLEQYQAPAPSVTPVTPVTPVTPVTPNEPRPLAWVLSAQSPKALRE
QAGRLYASLAEAPEWNSLDIGYSLATTRSDFAHRAVAVGSGREFLRALSKLADGASWPGLTTATAKARRVAFLFDGQ
GAQRLGMGKELYDSSPVFARAWDTVSAGFDKHLDHSLTDVYFGEGGSTTAELVDDTLYAQAGIFAMEVALFGLLEDW
GVRPDFVAGHSIGEATAAYASGMLSLEHVTTLIVARGRALRATPPGAMVALRAGEEEVRAFLDQTGAALDLAAVNSP
EAVVVAGEPDAVAGFEAAWAASGREARKLRVRHAFHSRHVEAVLDEFRTTLESLKFSAPALPVVSTVTGQLIEPDEM
GTPEYWLRQVRQPVRFQDAVRELAEAGVGTFVEIGPSGALASAGMECLGGDASFHAVLRPRSPEDVCLMTAIAELYA
GGTAIDWAKVLSGGRAVDLPVYPFQHQSYWLAPAEPSYADEPRTMLELVHMEVASVLGMTDPGVILDDSSFLELGFD
SLSAVRLRNRLSKATGLDLPSTLLFEHPTSAELASHLD
SEQ ID NO: 34
EPLAIVGMACRLPGGVSSPEDLWRLVESGTDAISGFPTDRGWDVEGLFDPDPDASGKSYCVRGGFLDSVGGFDASFF
GISPREALAMDPQQRLLLEVSWEAFERAGIEPGSVRGSDTGVFMGGFPGGYGAGADLEGFGATAGAASVLSGRVSYF
FGLEGPAITVDTACSSSLVALHQAGYALRQGECSLALVGGVTVMATPQSFVEFSRQRGLASDGRCKAFADAADGTGW
AEGVGVLLVERLSDAQAKGHQVLGVVRGSAVNQDGASNGLSAPNGPSQQRVIRAALSNAGLTTAEVDVVEAHGTGTT
LGDPIEAQAVLATYGQDREQPLLLGSLKSNIGHAQAAAGVSGVIKMVMALRHGLVPRTLHVDEPSRHVDWSAGAVEL
VTENQSWPVTGRPRRAGVSAFGVSGTNAHVILESAPAQASEEAQPVVTPVVTPVVASELVPLVVSAKTESALAEVEG
RLRAYLAVSPGVDLRAVGSTLAVARSVFEHRAVLLGDDTVTGTVTGTAVSDPRVVFVFPGQGWQWLGMGSALRGASV
VFAERMAECAAALGEFVDWDLFAVLDDPAVVDRVDVVQPASWAVMVSLAAVWEAAGVRPDAVVGHSQGEIAAACVAG
AVSLRDAARIVTLRSQVIAGLAGRGAMASVALPAHEIELVEGAWIAACNGPASTVIAGEPDAVDRVLAVHEARGVRV
RRITVDYASHTPHVELIRDELLNITAGIGSQAPVVPWLSTVDGTWVEGPLDAEYWYRNLREPVGFDSAVGELRAQGD
TVFVEVSASPVLLQAMDDDVVSVATLRRDDGGAARMLTALAQAFVEGVTVDWPAVLGNAPGRVLDLPTYAFEHQRYW
LKSRWLARLAPVEREKALLKVVCDGAATVLGHADASTIPAAGAFRDLGVDSLTAVELRNRLAKATGLRLPATLVFDY
PTPTALAARL
SEQ ID NO: 35
EPLAIVGMACRLPGGVSSPEDLWRLVESGTDAVSGFPTDRGWDVEDLFGPAAGDSYRLRGGFLDAAGGFDASFFGIS
PREALAMDPQQRLVLEVSWEAFERAGIEPGSVRGTDTGVFMGAYPGGYGIGADLGGFGTTAGAVSVLSGRVSYFFGL
EGPAFTVDTACSSSLVALHQAGYALRQGECSLALVGGVTVMATPQTFAEFARQGGLAGDGRSKAFADSADGAGFSEG
VGVLLVERLSDARRNGHQVLAVVRGSAVNQDGASNGLTAPNGPSQQRVIQAALNNAGLTTAEVDVVEAHGTGTTLGD
PIEAQALLAAYGQDRERPLLLGSVKSNLGHTQAAAGVSGVIKMVMALRHGLVPRTLHVDEPSRHVDWSEGAVELVTE
NQSWPDTGRPGRAGVSSFGISGTNAHVILESAPSAQTVENTVVESAPEWVPLVMSARTQSALADYEGRLRAYLAGSP
GVDLRAVASTLAVTRSVFEHRAVLMGDDTVTGSAVSDPRVVFVFPGQGSQRAGMGEELAAAFPVFAQIHQQVWDLLD
VPDLDVNETGYAQPALFALQVALFGLLESWGVGPDAVVGHSVGELAAAYASGVWSLEDACTLVSARARLMQALPAGG
VMVAVPVSEDEARAVLGEGVEIAAVNGPSSVVLSGDEAAVLRAAAGLGKWTRLATSHAFHSARMEPMLEEFRAVAER
LTYQTPHLTMAAGEQVTTPDYWVRQVRDVVRFGEQVASFEDAVFLELGADRSLARLVDGIAMLHGDHEAQDAISAMA
HLYVSGVAVDWPAVLGDVRGRVLDLPTYAFQHERYWLEGRWLAALAPAEREKALLKLVSDGAATVLGHADASTVPVS
AVFRDLGVDSLTAVELRNRLAKATGLRLPATLVFDYPTPTALAARL
SEQ ID NO: 36
EPLAIVGMACRLPGGVASPEDLWRLVESGTDAVSGFPTDRGWDVEDFDSAGKSYRAEGGFLDAAAGFDASFFGISPR
EALAMDPQQRLLLEVSWETFERAGIEPGSVRGTDTGVFMGAYPGGYGIGADLGGFGATAGATSVLSGRVSYFFGLEG
PAFTVDTACSSSLVALHQAGYALRQGECSMALVGGATVMATPELFTEFSRQGGLASDGRCKAFADSADGTGWAEGVG
VLLVERLSDAQAKGHQVLAVVRSSAVNQDGASNGLTAPNGPSQQRVIQAALSNAGLAAYEVDVVEAHGTGTTLGDPI
EAQAVLATYGQDRERPLLLGSLKSNIGHTQAASGVSGVIKMVMALQRGLVPRTLHVDEPSRHVDWSAGAVELVRENQ
SWPDTEGPRRAGVSSFGVSGTNAHVILESAPAQPAEEAQPVVTPVVASELVPLVVSAKSQSALTEAEGRLRAYLAAS
PGVDTRAVGATLAVARSVFEHRAVLLGDDTVTGTGTAMSDPRVVFVFPGQGWQWLGMGSALRDSSVVFAERMAECAA
ALSDFVDWDLFTVLDDPAVVDRVDVVQPASWAVMVSLAAVWEAAGVRPDAVIGHSQGEIAAACIAGALSLRDAARIV
SLRSQVIAGLAGRGAMASIALPAQDVELAEGAWIAAHNGPASTVIAGAPEAVDRVLAVHEARGVRVRRITVDYASHT
PHVELIRDELLHITAGIGSQAPVVPWLSTVDGTWVEGPLDAEYWYRNLREPVGFAPAIRQLQDQGETVFIEVSASPV
LLQAMDDDVVSVATLRRDDGGAARMVTALAQAYVQGVTVDWPAVLGNVPGRVLDLPTYAFEHQRYWLKSWLAALAPA
EREKALLKVVCDSAAVVLGHADARSIPAAGAFKDLGVDSLMAVELRNRLVKATGLRLPATLVFDYPTPAALAARL
SEQ ID NO: 37
EPLAIVGMACRLPGGVSSPEDLWRLVESGTDAVSGFPTDRGWDLEDLFDPDPEAAGKSYCVQGGFLDAAAGFDAGFF
GISPREALAMDPQQRLLLEVSWEAFERAGIEPGSVRGSDTGVFIGAFPVGYGVGFDREGYGATSGPSVLSGRVSYFF
GLEGPAITMDTACSSSLVALHLAAQALRNGECSMALAGGVTVMATPEVFTEFARQRGLASDGRCKAFADSADGAGFS
EGAGLLLVERLSDARRNGHQVLAVVRGSAVNQDGASNGLTAPNGPSQQRVIQAALINAGLTTAEVDVVEAHGTGTTL
GDPIEAQAVLATYGQGRERPLLLGSLKSNIGHTQAASGVSGVIKMVMALQRGLVPRTLHVDEPSRHVDWSAGAVELV
RENQSWPDSEGPRRAGVSSFGVSGTNAHVILESAPAQPAEEAQPVVTPVVASELVPLVVSAKTESALTEVEGRLRVY
LAASPGVDTRAVASTLAVTRSVFEHRAVLLGDDTVTGTGTAVSDPRVVFVFPGQGWQWLGMGSALRDSSVVFAERMA
ECAAALSEFVDWDLFAVLDDPAVVDRVDVVQPASWAVMVSLAAVWQAAGVRPDAVIGHSQGEIAAACVAGVLSLRDA
ARIVTLRSQAIAGLAGRGAMASIALPAQDVELVEGAWVAAHNGPASTVIAGAPEAVDRVLAVHEARGVRVRRIAVDY
ASHTPHVELIRDELLDITAGIGSQAPVVPWLSTVDGTWVEGPLDAEYWYRNLREPVGFAPAVSQLQVQGETVFVEVS
ASPVLLQAMDDDVVSVATLRRDDGGAARMLTALAQAYTQGVAVDWPAVLGTTTAQVLDLPTYAFQHRRYWVEWLAAL
APEEREKALLRVVCDGAATVLGHADVGSIPVTAAFKDLGVDSLTAVELRNRLAKATGLRLPATLAFDYPTPTALAAR
L
SEQ ID NO: 38
EPLAIVGMACRLPGGVSSPEDLWRLVESGTDAISGFPTDRGWDVEHLYDPDPDAPGKAYCVQGGFLDSAGGFDASFF
GISPREALAMDPQQRLVLEASWEAFERAGIEPGSLRGTDTGVFMGAYPGGYGIGADLGGFGATAGAVSVLSGRVSYF
FGLEGPAVTVDTACSSSLVALHQAGYALRQGECSLALVGGVTVMATPQSFVEFSRQRGLAGDGRCKAFADAADGTGW
AEGVGVLLVERLSDAQAKGHQVLAVVRGSAVNQDGASNGLSAPNGPSQQRVIRQALANAGLTTAEVDVVEAHGTGTT
LGDPIEAQALLATYGQDRERPLLLGSVKSNLGHTQAAAGVSGVIKMVMALRHGLVPRTLHVDEPSRHVDWSEGAVEL
VTENQPWPDADRPRRAGVSSFGISGTNAHVILESAPSTQAVDDVRPVEAPVVASEWVPLVVSARTLPALVEYEGRLR
AYLAGSPGVDMRAVGSTLAVTRSVFEHRAVLMGDDTVTGSAVSGPRVVFVFPGQGSQRAGMGEELAAAFPVFARIHQ
QVWDLLDVPDLEVNETGYAQPALFALQVALFGLLESWGVGPDAVIGHSVGELAAGYVSGLWSLEDACTLVSARARLM
QALPPGGVMVAVPVSEEEAKAVLCEGVEIAAVNGPSSVVLSGDETAVLRAAAALGKSTRLATSHAFHSARMEPMLDE
FRAVAERLTYQTPRLPMAAGEQVTTPDYWVRQVREPVRFGEQAASCGDAVFVELGADRSLARLVDGVAMLHGDHEAQ
AAISALAHLYVNGVTVDWPAVLGDVPGRVLDLPTYAFQHQRYWLEGWLAALAPEERAKALLKVVCDTAATVLGHADA
RTIPMTGAFRDLGIDSLTAVELRNGLAKATGLRLPATLVFDYPTPTVLAARL
SEQ ID NO: 39
EPLAIVGMACRLPGGVSSPEDLWRLVESGTDAISGFPTDRGWDAESLYDPDPDAPGKSYCVEGGFLDNAASFDAGFF
GISPREALAMDPQQRLVLEVSWEAFERAGIEPGSVRGTDTGVFMGAYAGGYGAGADLGGFAATASATSVLSGRVSYF
FGLEGPAFTVDTACSSSLVALHQAGYALRQGECSLALVGGATVMATPQSFVEFSRQRGLASDGRCKAFADAADGTGW
AEGVGVLLVERLSDARRNGHQVLAVVRSSAVNQDGASNGLSAPNGPSQQGVIRQALANAGLTPAEVDVVEAHGTGTT
LGDPIEAQAVLATYGQDRERPLLLGSLKSNIGHTQAASGVSGVIKMVMALQHHTVPRTLHVNEPSRHVDWSAGAVQL
VRENQSWPEGDRPRRAGVSSFGVSGTNAHIILESAPAQSAEEVQPVEVPVVASDVLPLVVSAKTHSALTEAEDRLRA
YLTASPEADMPAVASTLAVTRSVFEHRAVLLGDDTVTGTGTAVSDPRVVFVFPGQGWQWLGMGSALRDSSVVFAERM
AECAAALSDFVDWDLFAVLDDPAVVDRVDVVQPASWAVMVSLAAVWQAAGVRPDAVIGHSQGEIAAACIAGALSLRD
AARIVTLRSQVIAGLAGRGAMASIALPAQEVELAEGAWIAAHNGPASTVIAGTPEAVDLVLTAHEAQGTRVRRIAVD
YASHTPHVELIRDELLDITAGIGSQAPVVPWLSTVDGTWVEGPLDAEYWYRNLREPVGFAPAVRQLQDQGETVFIEV
SASPVLLQAMGDDAVTVATLRCDDGGAARMLTALAQAYTQGVAVDWPAVLGTTTARVLDLPTYAFQRQRYWVEWLAG
LAPEERAKALLKVVCDTAATVLGHADARTIPLTGAFKDLGVDSLTAVELRNSLTKATGLRLPATLVFDYPTPTALAV
RL
SEQ ID NO: 40
EPLAIVGMACRLPGGVSSPEDLWRLVESGTDAVSGFPTDRGWDLEDLFDPDPEAAGKSYCAEGGFLDAAAGFDAGFF
GISPREALAMDPQQRLLLEVSWEAFERAGIEPGSVRGSDTGVFIGAFPVGYAAGAAREGYGATAAPNVLSGRLSYFF
GLEGPAITMDTACSSSLVALHLAAQAVRNGECSMALAGGVTVMATPEVFTEFARQRGLASDGRCKAFADSADGAGFS
EGAGLLLVERLSDARRNGHQVLAVVRGSAVNQDGASNGFTAPNGPSQQRVIQQALANAGLTTAEVDVVEAHGTGTTL
GDPIEAQAVLATYGQDREQPLLLGTLKSNIGHTQAAAGVSGVIKMVMALQHDTVPRTLHVNEPSRHVDWTAGAVELV
TENQSWPVTDRPRRAGVSAFGVSGTNAHVILESAPAPSVNNAQPVETPVVASELVPLVISAKTLPALTEHEDRLRAY
LAASPEADMPAVASTLAVTRSVFEHRAVLLGDDTVTGTGAAVSDPRVVFVFPGQGWQWLGMGSGLRGSSVVFAERMA
ECAAALREFVDWDLFAVLDDPAVVDRVDVVQPASWAVMVSLAAVWEAAGVRPDAVVGHSQGEIAAACVAGAVSLRDA
ARIVTLRSQVIAGLAGRGGMASVALPAHEIELVEGAWIAARNGPAATVIAGEPDAVDRVLAIHEAQGVRVRRIAVDY
ASHTPHVELIHDELLGVIAGVDSQAPVVPWLSTVDGTWVEGPLDAEYWYRNLREQVGFDPAVSQLRAEGDTVFVEVS
ASPVLLQAMDDDAATVATLRRDDGDAARMLTALAQAFVEGVTVDWPAILGTATPGVLDLPTYAFQHQRFWAERWLAR
LAPVEREKALLKVVCDGAATVLGHADASTIPATAAFKDLGIDSLTAVELRNGLAKATGLRLPATLVFDYPTPTALAA
RL
SEQ ID NO: 41
EPLAIVGMACRLPGGVSSPEDLWRLVESGTDAVSGFPTDRGWDVGDLFGPAAGDSYRLRGGFLDAAGGFDASFFGIS
PREALAMDPQQRLVLEVSWEAFERAGIEPGSVRGTDTGVFMGAYPGGYGIGADLGGFGATASATSVLSGRVSYFFGL
EGPAITVDTACSSSLVALHQAGYALRQGECSLALVGGVTVMATPQTFVEFARQGGLAGDGRSKAFADSADGAGFSEG
VGVLLVERLSDAQAKGHQVLAMLRSSAVNQDGASNGLTAPNGPSQQRVIQAALSNAGLAPHEVDVVEAHGTGTTLGD
PIEAQALLATYGQDRERPLLLGSVKSNLGHTQAAAGVSGVIKMVMALRNGLVPRTLHVDEPSRHVDWSVGAVELVTE
NQSWPDSGRPRRAGVSSFGISGTNAHVILESEPPAQVVENTVVEPAPEWVPLVMSARTQSALADYEDRLRAYLAGSP
GVDLRAVGSTLAVTRSVFEHRAVLLGDDTVTGTAVSDPRVVFVFPGQGSQRAGMGEELAAAFPVFARIHQQVWDLLD
VPDLEVNETGYAQPALFALQVALFGLLESWGVGPDAVIGHSVGELAAGYVSGLWSLEDACTLVSARARLMQALPAGG
VMVAVPVSEEEAEAVLCEGVEIAAVNGPSSVVLSGDEAAVLRAAATLGKWTRLATSHAFHSARMEPMLEEFRAVAEG
LTYRTPRLTMAAGDQIATAEYWVRQVRDVVRFGEQAASCGDAVFVELGADRSLARLVDGVAMLHGDHEAQAAISALA
HLYVSGVAVDWPAVLGDVPGRVLDLPTYAFQHQRYWLEGRWLAALTPEERAKALVKVVCDSAATVLGHADASTIPVT
AAFRDLGVDSLTAVELRNSLTKATGLRLPATLVFDYPTAGALAARL
SEQ ID NO: 42
EPLAIVGMACRLPGGVFSPEDLWRLVESGTDAISGFPTDRGWDAENLFDPDPDAAGKSYCLEGGFLETAANFDASFF
EISPREALAMDPQQRLVLEASWEAFERAGIEPGSVRGSDTGVFMGAFPGGYGIGADLEGYGATSGLNVLSGRLSYFF
GLEGPAVTVDTACSSSLVALHQAGYALRQGECSLALVGGVTVMATPHTFVEFSRQRGLASDGRCKAFADSADGTGWS
EGVGVLLVERLSDAQAKGHQVLAVVRGSAVNQDGASNGLSAPNGPSQQRVIRQALANAGLTIAEVDVVEAHGTGTTL
GDPIEAQALLATYGQDREQPLLLGSVKSNVGHTQAAAGVSGVIKMVMALRNGLVPRTLHVDEPSRHVDWSEGAVELV
TENQPWPETGRPRRAGVSSFGVSGTNAHVILESAPPAQVVDNTVVESAPEWVPLVMSARTQSALADYEDRLRAYLAG
SPGVDLRAVASTLAVTRSVFEHRAVLMGDDTVTGTAVSDPRVVFVFPGQGSQRAGMGEELAAAFPVFARIHQQVWDL
LDVPDLEVNETGYAQPALFALQVALFGLLESWGVRPDAVVGHSAGELAAAYVSGVWSLEDACALVSARARLMQALPA
GGVMVAVPVSEEEAEAVLCEGVEIAAVNGPSSVVLSGDEAAVLRAAAGLGKWTRLATSHAFHSARMEPMLEEFRAVA
EGLTYRTPRLTMAAGDQVATAEYWVRQVRDVVRFGEQVASFEDAVFLELGADRSLARLVDGVAMLHGDHEAQAAISA
LAHLYVNGVTIDWPAVLGGVPGRVLDLPTYAFQHERYWAEAWLAALAPAEREKALLKLVSDGAATVLGHADASTIPV
TAAFKDLGIDSLTAVELRNSLAKATGLRLPATLVFDYPTPTALAARLD
SEQ ID NO: 43
EPLAIVGMACRLPGGVSSPEDLWRLVESGTDAISGFPTDRGWDVENLYDPDPDAPGKSYSVRGGFLDAAANFDASFF
GISPREALAMDPQQRLMLEVSWEAFERAGIEPRSVRGSDTGVFIGAYPGGYGIGVDFEGFGATAGAASVLSGRVSYF
FGLEGPAFTVDTACSSSLVALHQAGYALRQGDCSLALVGGVTVMATPQTFVEFSRQRGLSADGRCKAFADSADGTGW
AEGVGVLLVERLSDAQAKGHQVLGVVRGSAVNQDGASNGLSAPNGPSQQRVIRAALSNAGLAPHEVDVVEAHGTGTT
LGDPIEAQALLATYGQGRGEPLLLGSLKSNIGHTQAAAGVSGVIKMVMALQYGLVPRTLHVDEPSRHVDWTAGAVEL
VGENQPWPETGRPHRAGVSSFGISGTNAHVILESAPAQPAEEAQPVVTPVVASELVPLVVSAKTESALTEVEGRLRA
YLAASPGVDTRAVASTLAVTRSVFEHRAVLLGDDTVTGTGTAMSDPRVVFVFPGQGWQWLGMGSALRDSSVVFAERM
AECAAALSDFVDWDLFTVLDDPAVVDRVDVVQPASWAVMVSLAAVWQAAGVRPDAVIGHSQGEIAAACIAGAVSLRD
AARIVTLRSQAIAGLAGRGAMASIALPAQEIGLADGAWIAAHNGPASTVIAGAPEAVDRVLTAHEAQGARVRRIAVD
YASHTPHVELIRDELLDITAGIGSQAPVVPWLSTVDGTWVEGPLDAEYWYRNLREPVGFAPAVRQLQAQGETVFVEV
SASPVLLQAMDDDAVTVATLRRDDGDATRMLTALAQAYTHGVTVDWPAILGTTTTRALDLPTYAFQHERYWAEAWLV
GLAPEERAKALLKLVSDSAAAVLGHADARGIPATGAFKDLGVDSLTAVELRNTLTKATGLRLPATMVFDYPTPADLA
ARL
SEQ ID NO: 44
EPLAIVGMACRLPGGVSSPEELWQLVESGGDAISPFPTDRGWDLETPYRGGFLTDPAGFDAGFFGISPREAVAMDPQ
QRVLLEASWEAFERAGIKPDSLRGSDTGVFVGGFSQGYGTGADLGGFGATSTQTSVLSGRLSYFYGFEGPAVTVDTA
CSSSLVALHQAASSLHIGECSLAVVGGVTVVATPGGFVEFARQGGLALDGRCKAFADAADGIGLAEGVGVLLVERLS
DAQRNGHTVLAVVRGSAVNQDGASNGLSAPNGPSQQRVIRQALANARLTPADIDVVEAHGTGTRLGDPIEAQAILAT
YGQDRDQPLLLGSLKSNIGHTQAAAGVAGVIKTVMAMRHGTAPRTLHADEPSRHVDWSAGAVELLSENRLWPETDRP
RRAAVSSFGVSGTNAHVILESAPAESAEGPAGMGSESMGSESGPVVVVLSAKSASALAGQEERLRAYLASGADVRAV
AAGLARRSVFEHRSVILGDSTVSGVAAGVPRVVFLFPGQGTQWAGMGADLLESSPVFAARMRQCAAELSKYTDWDLF
TALSDPALLDRVDVVQPVSWALMVSLAALWQHCGVQPDAVIGHSQGEIAAACVAGALTLQDGARLITGRSALIAHLS
GRGTMASIALPADDLTLPDDVCIAAVNGPATTIIAGPTPAIEHLLATYEASNIHTRRIPVDYPSHTPHVEDLHDPLL
AITTHLTPHTPTTPWLSTVDNTWIHTPPHPDYWYRNLRHPVQLAPAITTLTHPHPTHLIEISTHPVLLPAIDTTTTL
TTTATLRRNHGTPHQLLTSLAHAHTHGATINWPALLGNPPTATTADLPTYPFQHKRYWLQDTERVAGLPAAEREQVV
VKAVCETAAVVLGHAHADDILATTLFKDLGVDSLIAVELRNRLAADAGLRLPATLVFDYPTPHALATWL
SEQ ID NO: 45
EPLAIVGMACRFPGGVSSPEDLWRLVESGGDAISDIPADRGWDLETPYRGGFLADAGGFDAGFFGISPREALAMDPQ
QRVLLETSWEALERAEIEPGSLRGSDTGVFIGGFSQSYGIGADLGGFGTTGIQTSVLSGRLSYFFGFEGPAFTVDTA
CSSSLVALHQASSALRQGECSLALVGGVTVLADPSGFVEFARQGGLAADGRCKAFADTADGTSLAEGVGVLLVERLS
DAQRNGHTVLAVVRGSAVNQDGASNGLSAPNGPSQQRVIRQALANARLTPADIDVVEAHGTGTRLGDPIEAQAILAT
YGQDRDQPVLIGSLKSNIGHTQAAAGVAGVIKMVMAMRQGTVPRTLHVDEPSHHVDWTAGSVQPITQNQEWPQAGRV
RRAGVSSFGISGTNAHVIIEGVPVAEPVVVADSGVVPLVLSARTPGALLEQEERLRAYLACGADVRAVAAGLARRSV
FEHRSVLVGDTVVSGTAADARLVLVFSGQGSQRAGMGEELAARFPVFAEIHQRVWDLLDVGPGLDVDDTGYAQPALF
ALQVALFGLLESWGVRPDVLIGHSIGELAAACVSGVWSLQDACALVSARARLMQALPAGGVMAAVPVSEAEAEAVLR
EGVEIAAVNGPASIVLSGDEDAVLQAAASLGRFTRLSTSHAFHCARMDPMLDEFRQVAESIAYQPPRIAMAAGDQVI
TPDYWVRQVREPVRFGDQVAAHADAVFLEIGPDRHLARLIDGIPTLSVDEVQSAMTALGELHVRGIDVDWATLLGTT
PATPTDIPTYPFQHKHYWIDNRRISGLEPAERGQALLEIVREAAAVVLGHTDAREIAPTTAFRDLGIDSLTAIELRN
RVATETGLRLPATLVFDHPTPTTLATWI
SEQ ID NO: 46
EPLAIVGMACRLPGGISSPEDLWQLVQSGGDAITDLPTDRGWDLTHLYDNDAPPVYRGGFLTDAGDFDAAFFGISPR
EALAMDPQQRILLETSWEAFERGGINPEAIRGSNTGVFIGGFSYGYGTGADLGGFGATSTQTSVLSGRLSYFYGFEG
PAVTVDTACSSSLVALHQASSALRQGECSLALAGGVTVMATPAGFEEFARQGGLAADGRCKAFSDTADGTGWAEGVG
VLLVERLSDAQRNGHTVLAVVRGSAVNQDGASNGLSAPNGPSQQRVIRQALANARLTPADIDVVEAHGTGTRLGDPI
EAQAILATYGQDRDQPLLLGSLKSNIGHTQAAAGVAGIIKTVMAMRHGTAPRTLHADEPSRHVDWSAGAVELLSENR
LWPETDRPRRAAVSSFGVSGTNAHVIIEQPPHTPAPEAERTTGLDVVPWLLSARTPAGLRAQAEQVSSLNEDFANIG
FSLATTRTPMEHRAVVVADVSGISEAAVFAGGGSPTDVVSGLANVRGKTVFVFPGQGAQWAGMGAELFATSPVFAER
MTECAAAFAALVDWSLIDVLQQREGAPSPDRVDVVQPLSFAVMVSLAALWKSHGVVPDAVTGHSQGEVAAACVSGAL
SLSDAATVVALRSRVIAQLAGHGGMVALPATEFAAEYWAGRLELAAVNGPASVVVAGEPEALEELLAENPNARRIPV
DYASHTSRVERIREELTGLLSGLAPRQPIVPFYSTVDNQWLDKPLDAEYWYRNLRQTVRFADAVHGLADAGFRAFVE
VSPHPVLTSSMRDILDERETTAVVTGTLRRDAHGVREFVRSLARLWVSGFSVDWSGLFGNGPRRIPLPTYPFQRNRY
WLQAELDLVRTHAAAVLGHAGPEAVAADHPFRDLGVDSLIAVELRNRLAAETGLRLPATLVFDYPTPRALAAWLD
SEQ ID NO: 47
EPLAIVGMACRFPGGVSSPEDLWRLVETSGDAISDIPADRGWDLETPYRGGFLIGAAGFDAGFFGISPREALAMDPQ
QRLLLEISWEALERAGINPESVRGSDTGVFVGGSSYGYGVGADLGGFGATSTHISVLSGRVSYFFGFEGPAFTVDTA
CSSSLVALHQASSALRQGECSLALVGGVTVMATPAGFEEFARQGGLAADGRCKAFSDTADGTSLAEGVGVLLVERLS
DAQRNGHTVLAVVRGSAVNQDGASNGLSAPNGPSQQRVIRQALANARLTPADIDVVEAHGTGTTLGDPIEAQAILAT
YGQDRDQPVLIGSLKSNIGHTQAAAGVAGVIKMVMAMRQGTVPRTLHVDEPSHHVDWTAGSVQPITQNQEWPQAGRV
RRAGVSSFGISGTNAHVIIEGVPVAEPVVVADSGVVPLVLSARTPGALLEQEERLRAYLACGADVRAVAAGLARRSV
FEHRSVLVGDTVVSGTAADARLVLVFSGQGSQRAGMGEELAARFPVFAEIHQRVWDLLDVGPGLDVDDTGYAQPALF
ALQVALFGLLESWGVRPDVLIGHSIGELAAACVSGVWSLQDACALVSARARLMQALPAGGVMAAVPVSEAEAEAVLR
EGVEIAAVNGPASIVLSGDEDAVLQAAASLGRFTRLSTSHAFHCARMDPMLDEFRQVAESIAYQPPRIAMAAGDQVI
TPDYWVRQVREPVRFGDQVAAHADAVFLEIGPDRHLARLIDGIPTLSVDEVQSAMTALGELHVRGIDVDWATLLGTT
PATPTDIPTYPFQHKHYWIDNTRISGLEPAERGQALLEIVREAAAVVLGHTDAREIAPTTAFRDLGIDSLTAIELRN
RVATETGLRLPATLVFDHPTPTTLATWI
SEQ ID NO: 48
EPLAIVGMACRLPGGISSPEDLWQLVQSGGDAITDLPTDRGWDLETPYRGGFLTDPAGFDAGFFGISPREALAMDPQ
QRVLLEASWEAFERAGIKPDSLRGSDTGVFVGGFSQGYGTGADLGGFGATSTQTSVLSGRLSYFYGFEGPAVTVDTA
CSSSLVALHQASSALRQGECSLALAGGVTVMATPAGFEEFARQGGLAADGRCKAFADTADGTGWAEGVGVLLVERLS
DAQRNGHTVLAVVRGSAVNQDGASNGLSAPNGPSQQRVIRQALANARLTPADIDVVEAHGTGTRLGDPIEAQAILAT
YGQDRDQPLLLGSLKSNIGHTQAAAGVAGIIKTVMAMRHGTAPRTLHADEPSRHVDWSAGAVELLSENRLWPETDRP
RRAAVSSFGVSGTNAHVILESAPAESAEGPAGMGSESMGSESGPVVVVLSAKSASALAGQEERLRAYLASGADVRAV
AAGLARRSVFEHRSVILGDSTVSGVAAGVPRVVFLFPGQGTQWAGMGADLLESSPVFAARMRQCAAELSKYTDWDLF
TALSDPALLDRVDVVQPVSWALMVSLAALWQHCGVQPDAVIGHSQGEIAAACVAGALTLQDGARLITGRSALIAHLS
GRGTMASIALPADDLTLPDDVCIAAVNGPATTIIAGPTPAIEHLLATYEASNIHTRRIPVDYPSHTPHVEDLHDPLL
AITTHLTPHTPTTPWLSTVDNTWIHTPPHPDYWYRNLRHPVQLAPAITTLTHPHPTHLIEISTHPVLLPAIDTTTTL
TTTATLRRNHGTPHQLLTSLAHAHTHGATINWPALLGNPPTATTADLPTYPFQHKRYWLQDTERLTTQSSVEQHRLM
LDLVTSHAAAVLGHSSAAAITTDTPFRDLGFDSLTAVELRNRVAADTGLRLPATLVFNHPNADALTQYL
SEQ ID NO: 49
DPIAIVAMACRLPGGVSSPEDLWRLVETGTDAIGPFPTDRGWDTELYPVPDAPGKTYCVEGGFLTGAAEFDAAFFDI
SPREALAMDPQQRLLLETSWEAVERARINPKSLCGKDVGVYVGAAAQGYGLGAGDQTEGTAITGGSTSLSSGRVSYA
LGLEGPAVTVDTACSSSLVAMHLAGQALRQGECSLALVGGVSVMASPALFVEFSRQRGLAADGRCKSFSDAADGTNW
AEGVGVLILERLSDAQRNGHPVLAVIRGSAINSDGASNGLTAPNGLSQQRVIRQALTAAGLRPEDVDAVEAHGTGTR
LGDPVEAEAILATYGQNREQPLLLGSLKSNIGHAAAASGVAGVIKMVQAMRNGVLPRTLHIDEPSSQVDWTSGNVAL
LTESRPWPDEDKPRRAGVSSFGISGTNAHIVLEQYRAAEPEDRPGDGPGERRPVAWVLSGKSPAAVRAQAGRLRAHL
VGTQGWRPVDVGYALATTRADFAHRAVAVGSGPEFLHALEKLAEGASWPRLTTNRASARRVAFLFDGQGTQRLGMGR
ELHQRFPAFAEAWDTVDAEFAPYLDRSLTEVFFSDGGSGLMDDTLYAQAGLFAVETALFRLLAGWGVRPDFVAGHSA
GEITAAHVAGVLSVTDAVRLIVARGQALRLAPPGAMASVRSSAQEVRDFIAQSGLPVDLAAINSPGSVVVAGSPETI
AEFEGAWTASGRQAKRLAVRHAFHSRHVDGVLDEFRAALGGCRFGVAELPLVSTATGELASPDELGTPEHWLRHARQ
TVRFQDAIRALTEQGVDTFVEIGPSGTLASAGMECGGGTAAFHAVMRARQPEEVSLMTAVAELYAGGTPVEWSRVLD
GRSVVDLPVYPFQRQPYWLAPADELSQPEQQKALLELVKAEAAVLLGITDATAIEDDARFLELGFDSLSATRLRNQL
AKATGLALEQTLLFDFPTPAALAAHL
SEQ ID NO: 50
EPLAIVGMACRLPGGVSSPEDLWRLVESGGDVISDFPTDRGWDTTGEDSSFIRGGFLTDAGGFDAGFFGISPREAVA
MDPQQRLVLETSWEVLERAGIEPGSLRGSDTGVFIGGFSQGYGAGADLGGFGATGTQTSVLSGRVSYYLGLEGPAVT
VDTACSSSLVALHQAASALRQGECSLALVGGVTVMATTHSFVEFARQGGLSSDGRCRSFADSADGTGWAEGVGVLLV
ERLSDARRSGHPVLALVRGSAVNQDGASNGLSAPNGLSQQRVIRQALATAGLDAADVDVVEAHGTGTVLGDPIEAQA
ILATYGQGREEPLLLGSLKSNVGHTQAAAGVAGVIKMVMAMRQGTVPRTLHVDEPSHHVDWTAGRVELLTENRPWPQ
AGRVRRAGVSSFGISGTNAHVIIEGVPVAEPVVVADSGVVPLVLSARTPGALLEQEERLRAYLACGADVRAVAAGLA
RRSVFEHRSVLVGDTVVSGTAADARLVLVFSGQGSQRAGMGEELAARFPVFAEIHQRVWDLLDVGPGLDVDDTGYAQ
PALFALQVALFGLLESWGVRPDVLIGHSIGELAAACVSGVWSLQDACALVSARARLMQALPAGGVMAAVPVSEAEAE
AVLREGVEIAAVNGPASIVLSGDEDAVLQAAASLGRFTRLSTSHAFHCARMDPMLDEFRQVAESIAYQPPRIAMAAG
DQVITPDYWVRQVREPVRFGDQVAAHADAVFLEIGPDRHLARLIDGIPTLSVDEVQSAMTALGELHVRGIDVDWATL
LGTTPATPTDIPTYPFQHKHYWIDNTRISGLEPAERGQALLEIVREAAAVVLGHTDAREIAPTTAFRDLGIDSLTAI
ELRNRVATETGLRLPATLVFDHPTPTTLATWI
SEQ ID NO: 51
EPLAIVGMACRLPGGISSPEDLWQLVQSGGDAITDLPTDRGWDLETPYRGGFLTDPAGFDAGFFGISPREALAMDPQ
QRVLLEASWEAFERAGIKPDSLRGSDTGVFVGGFSQGYGTGADLGGFGATSTQTSVLSGRLSYFYGFEGPAVTVDTA
CSSSLVALHQASSALRQGECSLALAGGVTVMATPAGFEEFARQGGLAADGRCKAFADTADGTGWAEGVGVLLVERLS
DAQRNGHTVLAVVRGSAVNQDGASNGLSAPNGPSQQRVIRQALANARLTPADIDVVEAHGTGTRLGDPIEAQAILAT
YGQDRDQPLLLGSLKSNIGHTQAAAGVAGIIKTVMAMRHGTAPRTLHADEPSRHVDWSAGAVELLSENRLWPETDRP
RRAAVSSFGVSGTNAHVILESAPAESAEGPAGMGSESMGSESGPVVVVLSAKSASALAGQEERLRAYLASGADVRAV
AAGLARRSVFEHRSVILGDSTVSGVAAGVPRVVFLFPGQGTQWAGMGADLLESSPVFAARMRQCAAELSKYTDWDLF
TALSDPALLDRVDVVQPVSWALMVSLAALWQHCGVQPDAVIGHSQGEIAAACVAGALTLQDGARLITGRSALIAHLS
GRGTMASIALPADDLTLPDDVCIAAVNGPATTIIAGPTPAIEHLLATYEASNIHTRRIPVDYPSHTPHVEDLHDPLL
AITTHLTPHTPTTPWLSTVDNTWIHTPPHPDYWYRNLRHPVQLAPAITTLTHPHPTHLIEISTHPVLLPAIDTTTTL
TTTATLRRNHGTPHQLLTSLAHAHTHGATINWPALLGNPPTATTADLPTYPFQRRRFWAERISGLEPAERGQALLEI
VREAAAVVLGHTDAREIAPTTAFRDLGIDSLTAIELRNRVATETGLRLPATLVFDHPTPTTLATWI
SEQ ID NO: 52
EPLAIVGMACRLPGGISSPEDLWQLVQSGGDAISDFPTDRGWDLTHLYDNDAPPVYRGGFLTDAGDFDAAFFGISPR
EALAMDPQQRLILETSWEVLERAGIEPGTLRGSETGVFVGGFTQGYGTGADLGGFGMTSGHSSVLSGRVSYFFGFEG
PAVTVDTACSSSLVALHQASSALRQGECSLALVGGVTVMASPQGFTEFSRQGGLSPDGRCKAFADAADGTGWAEGVG
VLLVERLSDAQRNGHTVLAVVRGSAVNQDGASNGLSAPNGPSQQRVIRQALANARLTPADIDVVEAHGTGTTLGDPI
EAQAILATYGQDRDQPLLLGSLKSNIGHTQAAAGVAGVIKMVMAMRHGTAPRTLHIDEPSRHIDWTTGSVALSTENQ
PWPETGHPRRAGVSAFGVSGTNAHVVLEGVPVAGPPEEDVEPGVVPLLISAKSRPALMEQEQRLRTYLDGSQTDIRA
VAATLAHARSVFEHRSVLVGDTVVSGTAADARLVLVFSGQGSQRAGMGEELAARFPVFAEIHQRVWDLLDVGPGLDV
DDTGYAQPALFALQVALFGLLESWGVRPDVLIGHSIGELAAACVSGVWSLQDACALVSARARLMQALPAGGVMAAVP
VSEAEAEAVLREGVEIAAVNGPASIVLSGDEDAVLQAAASLGRFTRLSTSHAFHCARMDPMLDEFRQVAESIAYQPP
RIAMAAGDQVITPDYWVRQVREPVRFGDQVAAHADAVFLEIGPDRTLARLIDGVPLLSKEDEVQAALVALAELHVRG
VPLEWSTVIGGMTSIVDLPTYPFRRKRYWIESAERLTTQSSVEQHRLMLDLVTSHAAAVLGHSSAAAITTDTPFRDL
GFDSLTAVELRNRVAADTGLRLPATLVFNHPNAGDLARHL
SEQ ID NO: 53
EPLAIVGMACRLPGGISSPEDLWQLVQSGGDAITDLPTDRGWDLTHLYDNDAPPVYRGGFLTDAGDFDAAFFGISPR
EALAMDPQQRILLETSWEAFERGGINPEAIRGSNTGVFIGGFSYGYGTGADLGGFGATSTQTSVLSGRLSYFYGFEG
PAVTVDTACSSSLVALHQASSALRQGECSLALAGGVTVMATPAGFEEFARQGGLAADGRCKAFADTADGTGWAEGVG
VLLVERLSDAQRNGHTVLAVVRGSAVNQDGASNGLSAPNGPSQQRVIRQALANARLTPADIDVVEAHGTGTTLGDPI
EAQAILATYGQDRDQPLLLGSLKSNIGHTQAAAGVAGIIKTVMAMRHGTAPRTLHADEPSRHVDWSAGAVELLSENR
LWPETDRPRRAAVSSFGVSGTNAHVILESAPAESAEGPAGMGSESMGSESGPVVVVLSAKSASALAGQEERLRAYLA
SGADVRAVAAGLARRSVFEHRSVILGDSTVSGVAAGVPRVVFLFPGQGTQWAGMGADLLESSPVFAARMRQCAAELS
KYTDWDLFTALSDPALLDRVDVVQPVSWALMVSLAALWQHCGVQPDAVIGHSQGEIAAACVAGALTLQDGARLITGR
SALIAHLSGRGTMASIALPADDLTLPDDVCIAAVNGPATTIIAGPTPAIEHLLATYEASNIHTRRIPVDYPSHTPHV
EDLHDPLLAITTHLTPHTPTTPWLSTVDNTWIHTPPHPDYWYRNLRHPVQLAPAITTLTHPHPTHLIEISTHPVLLP
AIDTTTTLTTTATLRRNHGTPHQLLTSLAHAHTHGATINWPALLGNPPTATTADLPTYPFQHKRYWLQDTRLSALAP
AEREQALVKAVCETAAMVLGHADTREIAATTAFKELGLDSLTAVQLRDRLAAETGRKLPATLVFDYPSPQALAAWL
SEQ ID NO: 54
EPLAIVGMACRLPGGVASPEDLWRLVESGTDAITDFPTDRGWDLDEVADQSYCLQGGFLDNAAGFDAAFFGISPREA
LAMDPQQRLVLEASWEAFERAGIKPGSLRGSDTGVFMGAYPGGYGTGADLGGFGATAGAVSVLSGRISYFFGFEGPA
MTVDTACSSSLVALHQAGYALRQGECSIALVGGVTVMATPQSFIEFSRQRGLAADGRCKTFADAADGTGWAEGVGVL
LVERLSDARAKGHQILAVVRGSAVNQDGASNGLSAPNGPSQQRVIRQALVNAGLSPADVDVVEAHGTGTTLGDPIEA
QALLTTYGQGRSVPLLLGSVKSNLGHTQAAAGVTGVIKMVMALRHGVVPRTLHVDEPSRHVDWSAGAVELVTSNREW
PVVDRPGRAGVSSFGISGTNAHVILEAVPSDTPASTSTDAVLPLVVSARTAPAAEDLTARLRAYLSAAPETDQRAAA
ATLALTRSVFEHRAVVLGDELVSGQAVRDPRVVFVFSGQGSQRAGMGEQLAAVFPVFAEIHERVWALLDVPDGLDVD
DTGHAQPALFALQVALSGLLESWGVRPAAVIGHSIGELAAAYVSGVWSLEDACALVSARARLMQALPPGGVMVAVPV
PEAEARAVLRDGVEIAAVNGPSSVVLSGDEDAVLQAVSGFAKWTRLKTSHAFHSAHMDPMLDEFRAVAERLTYRRPS
VEMAAGDRVTTAEYWVRQVREAVRFGDQTTAYEDAVFVEIGPGRTLARLIDGITMLHGDTEREAALTGLSQLFVRGV
DVDWATVIEDTTARILDLPTYAFQHENYWLHWLSGLTPAEREQALLTAVRENAAAVLGHADARTVPVNSAFRDLGFD
SLTAIELRNSLAKATGLSLPATMAFDYPTPAVLATRL
SEQ ID NO: 55
EPLAIVGMACRLPGGVSSPEELWRLVESGVDAISGFPVDRGWDVENLFDPDPDAAGKSYCVQGGFLDSAAEFDAAFF
GISPREALAMDPQQRLVLETSWEAFERAGIEPGSIKGSDTGVFMGAYQGGYGSGADLGGFGATAGATSVLSGRVSYF
FGFEGPAMTVDTACSSSLVALHQAGYALRQGECSLALVGGVTVMATPQSFVEFSRQRGLAVDGRSKAFADAADGTGW
AEGVGVLLVERLSDAQAKGHQILAVVRGSAVNQDGASNGLSAPNGPSQQRVIRQALANASLTPADVDVVEAHGTGTT
LGDPIEAQAVIATYGQDRSTPLLLGSLKSNIGHTQAAAGVSGVIKMVMALRHGVVPQTLHVDQPSRHVDWSAGAVEL
LTSNQPWPSSERARRAGVSAFGVSGTNAHVILESAPAEPVVAEAGPVPVVSDVLPLVLSAKSAPALRALEQRLRAYD
GAAGRALATARATFDHRAVLIGDDTVTGVAVPDPRVVFVFPGQGWQWLGMGRELRGSSVVFAERMAECAAALSEFVD
WDLFAALDDPAVVDRVDVVQPVCWAVMVSLAAVWQAAGVNPDAVVGHSQGEIAAAVVAGSLSLRDGARVVALRSQLI
KGLAGRGAMASIALPADQIGLVEGAWIAALNGPSSTVIAGTPEAVEQVLAAQDARVRRIAVDYASHTPQVEAIRDEL
LELTAGVSSQPPTVPWLSTVDNTWVEGPLPADYWFRNLREQVGFAQAVVTLGDAVFVEVSGSPVLMQSMGDAVTVAS
FRRDDGSATRMVTSLAEAYVQGVNVNWAAVLGAGTERALDLPTYPFQRQHYWISLAALPPAERERALLKVVRDSAAV
VLGHADGRTVPATAAFKDLGLDSLTAVELRNSLRKATGLQLPATLVFDYPSPVALAARL
SEQ ID NO: 56
EPLAIVGMSCRLPGGVSSPEDLWRLVESGVDAISGFPVDRGWDAEGLFDPDPDAAGKTYCVQGGFLEAAGEFDTAFF
GISPREALAMDPQQRVLLEASWEAFERAGIGADTVRGTDTGVFIGAYPVAYGAGVDREGYGATAAPNVLSGRLSYFF
GLEGPAITVDTACSSSLVALHLAASALRNGECSLALAGGVTVMATPEVFTEFARQRGLAFDGRSKSFADAADGAGFS
EGAGLLVLERLSDARRNGHQVLAVIRGSAVNQDGASNGFTAPNGPSQQRVIEAALGNAGLTTAEVDVVEAHGTGTKL
GDPIEAQAVLATYGQDRDLPLLLGSLKSNIGHTQAASGVAGVIKMVMALRHGVVPQTLHVDEPSRHVDWSAGAVELV
TSNQPWPSSERPRRAGVSAFGVSGTNAHVILESAPVEPVVAEAGPVPVVGDVLPLVVSAKSAPALTVLEQRLRAYEA
ADEKAVAATLAAARATFGHRAVLLGGDTVTGVAVPDPRVVFVFPGQGWQWLGMGRELRGSSVVFAERMAECAAALSE
FVDWDLFTALDDPAVVDRVDVVQPVCWAVMVSLAAVWQASGVNPDAVVGHSQGEIAAAVVAGSLSLRDGARVVALRS
QLIKGLAGRGAMASIALPAAEIDLVEGSWIAALNGPSSTVIAGTPEAVEQVLAVQDARVRRIAVDYASHTPQVEAIR
DELLELTGEVVSRKPDVPWLSTVDNAWIEGPLGADYWFRNLREQVGFAQAVVTLGDAVFVEVSASPVLMQSMGDAVC
VPSLRRDDGTATRMVTSLAEAYVQGVQVNWAAVLGAGTERALDLPTYPFQRQHYWALHWLARLSPAEREQALLKLVC
ESASVVLGHADAGAIPVTAAFKDLGVDSLTAVELRNSLATATGQRLPATAVFDYPTPAVLAARL
SEQ ID NO: 57
EPLAIVGMACRLPGGVSSPEGLWRLVVSGSDVISGFPADRGWGVEGLRGGFLPGAADFDAGFFGISPREALAMDPQQ
RLVLEASWEVLERAGIAPGSLRGSDTGVFMGAYPGGYGIGADLGGFGATAGAVSVLSGRVSYFFGFEGPAMTVDTAC
SSSLVALHQAGHALRNSECSLALVGGVTVMASPQTFVEFERQGGLAADGRSKAFSDGADGAGFSEGVGVLLVERLSD
ARAKGHQILALVRGSAVNQDGASNGLTAPNGPSQQRVIRQALANASLTVADVDVVEAHGTGTTLGDPIEAQALLATY
GQDRDRPLLLGSVKSNLGHTQAAAGVTGVIKMVMALRHGVVPRTLHVDEPSRHVDWSAGAVELVTSNREWPVTDRPG
RAGVSSFGISGTNAHVILEAVPVVSAVSTGGEVQPLVVSARTAPAAEDLTARLRTYLADTPDTDQRAAATTLALTRS
VFEHRAVLLGDDTITGAAVPDPRVVFVFSGQGSQRAGMGEQLAAAFPVFAEIHERVWALLDVPDGLDVDDTGHAQPA
LFALQVALSGLLESWGVRPAAVIGHSIGELAAAYVSGVWSLEDACVLVSARARLMQALPPGGVMVAVPVPEAEARAV
LRDGVEIAAVNGPSSVVLSGDEDAVLQAVAGFAKWTRLKTSHAFHSAHMDPMLDEFRAVAERLTYRRPSVEMAAGHG
VTTAEYWVRQVREAVRFGDQTTAYEDAVFVEIGPGRTLARLIDGITMLHGDTEREAALTGLSQLFVRGVDVDWPAVI
EDTTARILDLPTYPFQRQRYWLTPRWLAGMSPEDRRQALLRVVRDSAAVVLGHAEAGTIPPNAAFKDLGIDSLTAVE
LRNSLATATGLRLPATLVFDYPAPETLAARLD
SEQ ID NO: 58
EPLAIVGMACRLPGGVASPEDLWRLVASGTDAISGFPTDRGWDVEGLFDPDPDVAGKTYCVQGGFLDTAARFDAAFF
GISPREALAMDPQQRLVLEASWEAFERAGIEPGSLRGSDTGVFMGAFPGGYGLGADLEGYGVTGGPNAVSGRLSYFF
GLEGPAFTVDTACSSSLVALHQAGYALRQGECSLALVGGVTVMGTPQTFVEFSRQRGLAVDGRSKSFSDQADGTGWS
EGVGVLVVERLSDARAKGHQILAVVRGSAVNQDGASNGLTAPNGPSQQRVIRQALANASLTVADVDVVEAHGTGTTL
GDPIEAQALLATYGQDRDRPLLLGSVKSNLGHTQAAAGVAGVIKMVMALQHGIVPQTLHVSEPSRHVDWTAGAVELV
TSNQPWPSSGRPGRAGVSAFGVSGTNAHVILEGVPSNTPVSTAAGDVLPLVVSARTAPAVEDLTARLRTYLADTPGT
DQRAAATTLALTRSVFEHRAVLLGEDTITGVAVPDSRVVFVFSGQGSQRAGMGEQLAAAFPVFAAIHERVWALLDVP
DGLDVDDTGHAQPALFALQVALSGLLESWGVRPDAVIGHSIGELAAAYVSGVWSLEDACALVSARARLMQALPSGGV
MVAVPVPEAEARAVLRDGVEIAAVNGPSSVVLSGDEDAVLQAVAGFAKWTRLKTSHAFHSAHMDPMLDEFRAVAERL
TYRRPSVEMAAGDRVTTAEYWVRQVREAVRFGDQTTAYEDAVFVEIGPGRTLARLIDGITMLHGENEGHAALAALSH
LFVQGVRVDWPAVLGTTAERVDLPTYPFQHEHYWARAEHWLAGLPADEREKALLKIVRDSAAAVLGHADGRTVASGA
VFKELGLDSLTAVELRNSLGKATGLRLPSTAAFDYPTPAALATRL
SEQ ID NO: 59
EPLAIVGMACRLPGGVSSPEDLWRLVESGSDAISGFPTDRGWDVDGLFDPDPDAAGKSYCVQGGFLDSAAEFDAAFF
GISPREALAMDPQQRLLLETSWEAFERAGIDPGSVRGSDTGVFVGAFPGGYGAGADIEGYGATAGPSVLSGRLSYFF
GLEGPAFTVDTACSSSLVALHQAGHALRQGECSLALVGGVTVMASPVTFVEFSRQRGLAADGRCKAFGDGADGTGWS
EGVGVLLVERLSDAQAKGHQILAVVRGSAVNQDGASNGLTAPNGPSQQRVIQAALASAGLVTSDVDVVEAHGTGTTL
GDPIEAQAVLATYGQDRSTPLLLGSLKSNIGHTQAAAGVSGVIKMVMALRHGVVPQTLHADEPSRHVDWSAGAVELL
TSNRSWPSSERARRAGVSAFGVSGTNAHVILESAPVEPVVAVAGPVPVVSDVLPLVLSAKSAPALTALEQRLRVYDG
AAGRALATARATFDHRAVLIGDDTVTGVAVPDPRVVFVFPGQGWQWLGMGRELRDSSVVFASRMAECAAALSEFVDW
DLFTALDDPAVVDRVDVVQPVCWAVMVSLAAVWQASGVNPDAVVGHSQGEIAAAVVAGSLSLRDGARVVALRSQLIK
GLAGRGAMASIALPAAEIDLVEGSWIAALNGPSSTVIAGTPEAVEQVLAVQDARVRRIAVDYASHTPQVEAIRDELL
ELTAEVESRRPDVPWLSTVDNTWVEGPLSADYWFRNLREQVGFAQAVVTLGDAVFVEVSASPVLMQSMGDAVTVATL
RRDDGSALRMVTSLAEAYVQGVNVNWAAVLGAGTERALDLPTYPFQRQHYWVTAQSLAGLPAEDREKALLKIVRDSA
AQVLGHPDGRAVPAGAAFIELGVDSLTGVEMRNRLGGITGLRLPATMVFDYPTPAALAGRL
SEQ ID NO: 60
EPLAIVGMACRLPGGVSSPEELWRLVESGVDAISGFPVDRGWDVENLFDPDPDAAGKSYCVQGGFLDTAAEFDAAFF
GISPREALAMDPQQRLVLETSWEAFERAGIEPGSLKGSDTGVYMGAFSGGYAADLEGFGATAGATSVLSGRVSYFFG
FEGPAMTVDTACSSSLVALHQAGYALRQGECSLALVGGVTVMASPQSFVEFSRQRGLAADGRSKAFADAADGTGWAE
GVGVLLVERLSDAQAKGHQILAVVRGSAVNQDGASNGLSAPNGPSQQRVIRQALANASLTPADIDVVEAHGTGTTLG
DPIEAQAVIATYGQDRSTPLLLGSLKSNIGHTQAAAGVSGVIKMVMALRHGVVPQTLHVDQPSRHVDWSAGAVELVT
SNQPWPSSERPRRAGVSAFGVSGTNAHVILESAPAEPVVAEVGLVPVVSDVLPLVLSAKSAPALTVLEQRLRAYEAA
DERTVAATLATARATFDHRAVLIGTETVTGPLMTDPRVVFVFPGQGWQWLGMGRELRGSSVVFAERMAECAAALSDF
VDWDLFTALDDPAVVDRVDVVQPVCWAVMVSLAAVWQAAGVNPDAVVGHSQGEIAAAVVAGSLSLRDGALVVALRSQ
LIKGLAGRGAMASIALPADQIGLVEGAWIAALNGPSSTVIAGSPEAVEQVLAAQDARVRRIAVDYASHTPQVEAIRD
ELLELTAGVSSQPPTVPWLSTVDNTWVEGPLPADYWFRNLREQVGFAQAVVTLGDAVFVEVSASPVLMQSMGDAVCV
PSLRRDDGSATRMVTSLAEAYVQGVNVNWAAVLGAGTERALDLPTYPFQRQRYWAGHWLARLAPGERETALLKLVSE
SAAAVLGHADARSIPATAVFRDLGMDSLTAVEVRNSLAKTTGLRLPATLAFDYPTPAVLAARL
SEQ ID NO: 61
EPLAIVGMACRLPGGVSSPEGLWRLVVSGSDVISGFPADRGWGVEGLRGGFLPGAADFDAGFFGISPREALAMDPQQ
RLVLEASWEVLERAGIAPGSLRGSDTGVFMGAYPGGYGIGADLGGFGATAGAVSVLSGRVSYFFGFEGPAMTVDTAC
SSSLVALHQAGHALRNSECSLALVGGVTVMASPQTFVEFERQGGLAADGRSKAFSDGADGAGFSEGVGVLLVERLSD
ARAKGHQILALVRGSAVNQDGASNGLTAPNGPSQQRVIRQALANASLTVADVDVVEAHGTGTTLGDPIEAQALLATY
GQGRSVPLLLGSVKSNLGHTQAAAGVTGVIKMVMALRHGVVPRTLHVDEPSRHVDWSAGAVELVTSNREWPVVDRPG
RAGVSSFGISGTNAHVILEGIPSNTPVSTAAGAVLPLVVSARTAPAAEDLTARLRAYLSAAPETDQRAAAATLALTR
SVFEHRTVLLGDDTITGAAMPDPRVVFVFSGQGSQRAGMGEQLAAVFPVFAEIHERVWALLDVPDGLDIDDTGHAQP
ALFALQVALSGLLESWGVRPDAVIGHSIGELAAAYVSGVWSLEDACALVSARARLMQALPPGGVMVAVPVSEAEART
VLRDGVEIAAVNGPSSVVLSGDEDAVLQAVSGFAKWTRLKTSHAFHSAHMDPMLDEFRAVAERLTYRRPSVEMAAGH
GVTTAEYWVRQVREAVRFGDQTTAYEDAVFVEIGPGRNLARLIDGITMLHGDTEREAALTGLSQLFVRGVDVDWATV
IEDTTARILDLPTYPFQHERYWLSWLVGLPPAERAKALLKTVRDSAAVVLGHQGTRAIPVDGAFRELGMDSLTAVEL
RNSLAKATGLSLSATLVFDYPTPKVLADHLD
SEQ ID NO: 62
EPLAIVGMACRLPGGVSSPEELWRLVESGSDAISGFPVDRGWDADGLFDPDPDAAGKSYCVQGGFLDTAAEFDAAFF
GISPREALAMDPQQRLVLETSWEAFERAGIEPGSIKGSDTGVFIGAYPGGYGSGVELGGFGATSGAGSVLSGRVSYF
FGFEGPAMTVDTACSSSLVALHQAGYALRQGDCSMALVGGVTVMSTPHIFVEFSRQRGLAADGRCKAFGDGADGTGW
SEGVGVLLVERLSDARAKGHQVLAVVRGSAVNQDGASNGLTAPNGPSQQRVIHAALASAGLVTSDVDVVEAHGTGTT
LGDPIEAQAVIATYGQDRSTPLLLGSLKSNIGHTQAAAGVSGVIKMVMALRHGVVPQTLHVDQPSRHVDWSAGAVEL
LTSNQPWPSSERARRAGVSAFGVSGTNAHVILESAPVEPVVAEAGPVPVVSDVLPLVLSAKSAPALRALEQRLRVYD
GAAGRALATARATFDHRAVLIGDDTVTGVAVPDPRVVFVFPGQGWQWLGMGRELRGSSVVFAERMAECAAALSEFVD
WDLFAALDDPAVVDRVDVVQPVCWAVMVSLAAVWQAAGVNPDAVVGHSQGEIAAAVVAGSLSLRDGALVVALRSQLI
KGLAGRGAMASIALPATEISLVEGAWIAALNGPSSTVIAGSPEAVEQVLAVQDARVRRIAVDYASHTPQVEAIRDEL
LELTAGVSSQLPTVPWLSTVDNTWVEGPLPADYWFRNLREQVGFAAAVQELGESVFVEVSGSPVLIQSMGDAVTVAT
LRRDDGSATRMVTSLAEAYVQGVQVNWAAVLGAGSERALDLPTYPFQRDHFWVLSLAALPSAEREKALVKIVCESAA
AVLGHTDTSAVPAAAAFKELGLDSLTAVDLRNRLRRATGLQLPATLVFDYPTPTAMAARL
SEQ ID NO: 63
EPLAIVGMSCRLPGGVSSPEDLWRLVESGSDAISGFPTDRGWDVDGLFDPDPDAAGKTYCVQGGFLEAAGEFDAAFF
GISPREALTMDPQQRVLLEASWEAFERAGIAPTSVRGTDTGVFIGAFPVGYGAGADHEGYTATAGVGSVLSGRLSYF
FGLEGPAMTMDTACSSSLVALHLAASALRNGECSLALAGGVTVMATPEVFTEFARQRGLAADGRCKPFADAADGAGF
SEGAGLLVLERLSDARRNGHQVLAVIRGSAVNQDGASNGLTAPNGPAQQRVIRQALANAGLNSSDVDVLEAHGTGTT
LGDPIEAQAVLATYGQDRSTPLLLGSLKSNIGHTQAASGVAGVIKMVMALRNGLVPRSLHLDEPSRHVDWSAGAVEL
LTSNQPWPSSDRPRRAGVSAFGVSGTNVHVILESAPAEPVGAEAGPLPVVGDVLPLVVSAKSAPALTALEQRLRAHV
AADERAAAATLATARATFDHRAVLIGAETVTGVAAVDPRVVFVFPGQGWQWLGMGRELRGSSVVFAERMAECAAALS
EFVDWDLFTALDDPAVVDRVDVVQPVCWAVMVSLAAVWQAVGVNPDAVVGHSQGEIAAAVVAGSLSLRDGALVVALR
SQLIAGLAGRGAMASIALPADQISLVEGAWIAALNGPSSTVIAGTPEAVEQVLAAQDARVRRIAVDYASHTPQVEAI
RDELLELTGEVVSRKPDVPWLSTVDNAWIEGPLGADYWFRNLREQVGFAQAVVTLGDAVFVEVSASPVLMQSMGDAV
CVPSLRRDDGTATRMVTSLAEAYVQGVQVNWAAVLGAGTERALDLPTYPFQRERFWVLWLAGLAPQERETALLKLVC
DSAAVVLGHGDGQAIPDTTAFKDLGVDSLTAVEVRNRLAAATGLRLPATMVFDYPTPTALAARL
SEQ ID NO: 64
EPLAIVGMACRLPGGVASPEDLWRLVESGTDAITGFPADRGWTTEPGQGGFLADAAGFDAAFFGISPREALAMDPQQ
RLLLETSWEAFERAGIAPLSLRGSDTGVYIGAYPDGYGIGADLGGFGTTAGSPSVLSGRVSYFFGLEGPAITVDTAC
SSSLVALHQAGYALRNNECSLALVGGVTVMATPEVFSAFALQDGLAADGRSKAFSDGADGAGFSEGVGVLLVERLSD
AQANGHQILALVRGSAVNQDGASNGLTAPNGPSQQRVIRQALANASLTPADVDVIEAHGTGTTLGDPIEAQALLATY
GQGRSVPLLLGSVKSNLGHTQAAAGVTGVIKMVMALRHGVVPRTLHVDEPSRHVDWSAGAVELVTSNREWPVTDRPG
RAGVSSFGISGTNAHVILEAVPVVSAVSTGGEVQPLVVSARTAPAAEDLASRLRTYLADTPDTDQRAAAATLALTRS
VFEHRTVLLGDDTITGAAMPDPRVVFVFSGQGSQRAGMGEQLAAVFPVFAEIHERVWALLDVPDGLDIDDTGHAQPA
LFALQVALSGLLESWGVRPDAVIGHSIGELAAAYVSGVWSLEDACALVSARARLMQALPPGGVMVAVPVPEAEARTV
LRDGVEIAAVNGPSSVVLSGDEDAVLQAVSGFAKWTRLKTSHAFHSAHMDPMLDEFRTVAERLTYRRPSVEMAAGHG
VTTAEYWVRQVREAVRFGDQTTAYEDAVFVEIGPGRTLARLIDGITMLHGDTEREAALTGLSQLFVRGVDVDWATVI
EDTTARILDLPTYPFQHERYWAGRWLAGLAPDKRDAALLTMVRDSAARVLGHADGSAISPTATFRDLGVDSLTAVEL
RNRLARTAGLRLATTIVFDYPTPTALAAHL
SEQ ID NO: 65
EPLAIVGMACRLPGGVASPEDLWRLVESGTDAITGLPTDRGWDLGAVAAESYCVEGGFLDGVAGFDAAFFGISPREA
LAMDPQQRLLLETSWESLERAGIAPLSLRGSDTGVFMGAYPGGYGAGADLGGFGTTSGAASVLSGRISYFFGLEGPA
MTVDTACSSSLVALHLAGQALRNGECSLALVGGVTVMAAPDIFPEFARQRGLASDGRSKAFADSADGTGWSEGVGVL
LVERLSDAQANGHQILALVRGSAVNQDGASNGLTAPNGPSQQRVIRQALANASLTPADVDVIEAHGTGTTLGDPIEA
QALLATYGQGRSVPLLLGSVKSNLGHTQAAAGVTGVIKMVMALRHGVVPQTLHVDEPSRHVDWSAGAVELVTSNREW
PVTDRPGRAGVSSFGISGTNAHVILEAVPSDTPAPTTTDAVLPLVVSTRTAPAAEDLTARLRAYLSAAPETDQRAAA
ATLALTRSVFEHRAVVLGEDTITGVAVPDPRVVFVFSGQGSQRAGMGEQLAAAYPVFAAIHERVWALLDVPDGLDVD
DTGHAQPALFALQVALSGLLESWGVRPAAVIGHSIGELAAAYVSGVWSLEDACVLVSARARLMQALPPGGVMVAVPV
PEAEARAVLRDGVEIAAVNGPSSVVLSGDEDAVLQAVSGFAKWTRLKTSHAFHSAHMDPMLDEFRAVAERLTYRRPS
VEMAAGDRVTTAEYWVRQVREAVRFGDQTTAYEDAVFVEIGPGRTLARLIDGITMLHGDTEREAALTGLSQLFVRGV
DVDWATVIEDTTARILDLPTYPFQHEHYWLRRAARTPAERAQELLKLVRDNAAAVLGHADGRTVPAAAAFRDLGVDS
LIAVELRNNLALATGLQLPTTIVFDYPTASSLAERL
SEQ ID NO: 66
EPLAIVGMACRLPGGVESPEDLWRLVESGADAISGFPTDRGWDADGLFDPDLAVGKTYCVQGGFLQTAAEFDPAFFG
ISPREALAMDPQQRLVLETSWEAFERAGIEPGSLKGSDTGVFMGAYPGGYGMGADLGGFAATAGAGSVLSGRVSYFF
GFEGPAMTVDTACSSSLVALHQAGYALRQGECSLALVGGVTVMASPQSFVEFSRQRGLAADGRSKAFADAADGTGWA
EGVGVLLVERLSDAQAKGHRILAVVRGSAVNQDGASNGLSAPNGPSQQRVIRQALANASLTPADIDVVEAHGTGTTL
GDPIEAQAVIATYGQDRSTPLLLGSLKSNIGHTQAAAGVSGVIKMVMALRHGVVPQTLHVDQPSRHVDWSAGAVELV
TSNQPWPSSERPRRAGVSAFGVSGTNAHVILESAPVEPVGAEAGLVPVVADVLPWVVSAKSAPALRALEQRLRAYEA
ADERTVVATLATARATFDHRAVLIGTETVTGPLMTDPRVVFVFPGQGWQWLGMGRELRGSSVVFAERMAECAAALSE
FVDWDLFTALDDPAVVDRVDVVQPVCWAVMVSLAAVWQAAGVNPDAVVGHSQGEIAAAVVAGSLSLRDGALVVALRS
QLIKGLAGRGAMASIALPADQIDLVEGAWIAALNGPSSTVIAGTPEAVEQVLAAQDARVRRIAVDYASHTPQVEAIR
DELLELTAEVLSRKPDVPWLSTVDNTWVEGPLPADYWFRNLREQVGFAQAVVTLGDAVFVEVSASPVLIQSMGDAVT
VATLRRDDGSATRMVTSLAEAYVQGVQVNWGAVLGAGTERALDLPTYPFQRQHYWALERLGERAGTERHRLMLEVVL
GHAASVLGHSSAAALEPDRPFKDLGMDSLTAIELRNHLVAETGLRLPATMVFDFPTADALAGHL
SEQ ID NO: 67
EPIAVVSMACRLPGGVDTPEGLWRLVESGTDAISGFPTDRGWDLTDFYSADPQGGFLTGAAEFDAGFFGISPREALG
MDPQQRLLLETTWEAIERAQLDPRSLRGRDVGVYVGGAAQGYGVGFAGEPRDNAITASSISLLSGRVSYALGLQGPG
VTVDTACSSSLVALHLACQALRQRECSLALVGGVSVIATPDVFAEFSRQNGLAADGRCKSFGAAADGTGWSEGVGML
VLERLSEATRHGHRILAVVRGSAVNSDGASNGLTAPNGQSQQRVIRQALSNAGLAASDVDVVEAHGTGTRLGDPIEA
EAILATYGQDRAAPAWLGSLKSNIGHTMAASGVLGVIKMVEAMRHGTVPRTLHVDEPSPHVDWSAGRVALLTENQPW
PDGAKPRRAGVSSFGLSGTNAHVVLEQHPEPASPVPARETGPVPWVLSAQSPKALQEQAGRLHAALVSDPRWHPLDV
AFSLATTRSAFTHRTAVVASGRDLLEALSTLATSATATSTTARTRRVAFLFDGQGTQRAGMGRELYERHPAFARAWD
EVSAAFDKHLEHPLHAVYFGAGALDELVDDTGYAQAAIFTFEVALFELLHEWGVRPDFVAGHSIGEVAAAYVSGLFS
LADAAQLIVARGRALRSAPPGAMAALRAGETETREFLARTGTALDVAAVNSPEAVVVSGSPEAVAEFTAAWTASGRR
ARRLNVNRAFHSRHVDGLLDDFRAVLESLTCRTDTVLPMVSTVTGRLIDPAELRTPQYWLSQVRDTVRFQDAVAELA
ANGVGVFVEVGPSSSLASAGTETLGDEAHFQALQHSRTPADPALLTALAGLHSGGVGVDWEKVLVGGRAVELPVYPF
QHRAYWLAPASTQEPATMLELVRFEVAAVLGMPDPAAVFEETSFLELGFDSLSAVRLRNRLTRSTGVELPATLLFDH
PTPAELAAHL
SEQ ID NO: 68
EPLAIVGMACRLPGGVASPEDLWRLVESGTDAISDFPTDRGWDVEGLYDPDPDVPGKSYAVKGGFLDAAGFDAAFFG
ISPREAAAMDPQQRLVLEASWEAFERAGIEPGSVRGSDTGVFMGAMANGYGAGADLGGFGATAGAGSVLSGRISYFF
GLEGPAMTVDTACSSSLVALHQASFALRQGECSLALVGGVTVMPTPQLFVEFARQRGLAVDGRSKAFADAADGSGFS
EGVGVLVVERLSDAQAKGHRVLAVVRGSAVNQDGASNGLSAPNGPSQQRVIRQALDNAGLSSMDVDVVEGHGTGTRL
GDPIEAQAVISTYGQDRERPLLLGSLKSNIGHAQAAAGVSGVIKMVMALRHGVVPQTLHVDEPSRHVDWAAGAVELV
TENQPWPVAERARRAGVSSFGISGTNAHVILESAPAEAASASEPVTPPSEVSVPVVASDVVPLVVSAKTPGALTDIE
ERLRGYLAAAPEADMQAVASTLAATRSVFEHRAVLLGDDTITGIATPDPRVVFVFPGQGWQWLGMGSVLRETSPVFA
GRMAECAAALREFVDWDLFSVLDDPTVVDRVDVLQPACWAVMVSLAAVWQEAGVSPDAVIGHSQGEIAAACVAGAVS
LRDAARIVALRSKLIGARLGHGAMASIALPADAITLTDGAWIAAHNGPASTVIAGTPQAVDTVLAAYEAQGIRVRRI
TVDYASHSPQVEEIHTELLDATATVGSQTPAVPWLSTVDGAWVEGPLDADYWYRNLREPVRFDQAVTHLQTQGETVF
IEVSASPALTPAMNDDAITVATLRRDDDSPTRILTALAEAFVQGVGVDWPAVTGATTARVLDLPTYAFQRQRYWTLS
GLAAAERRQALAKLVRESAAVVLGHADPDSVPAAAAFKDLGVDSLTAVELRNSLGRSTGLRLPATMVFDYPTPDALA
ARLD
SEQ ID NO: 69
EPLAIVGMACRLPGGVDSPEDLWRLVESGTDAISGFPTDRGWDLDSLYDPILGASGEFYSAQGGFLDRAADFDASFF
GISPREALAMDPQQRLVLEVSWEALERAGIEASSVRGSDTGVFMGAMANGYGIGADFGAFGMTASAGSVLSGRVSYF
FGLEGPAMTVDTACSSSLVALHQAGYSLRQGECSMALVGGVTVMPTPQTFVEFARERGLAVDGRSKAFADAADGSGF
SEGVGVLVVERLSDARARGHRVLAVVRGSAVNQDGASNGLSAPNGPSQQRVIRQALANAGLASADVDVVEAHGTGTR
LGDPIEAQAVIETYGQDRERPLLLGSLKSNIGHTQAAAGVSAVIKMVMALRHGVVPQTLHVDEPSRHVDWTAGAVEL
ATEKLPWPASDRVRRAGVSSFGISGTNAHVILESVPAEVVSPSESSGPNLASDVVPLVVSAKTSGALVDIEERLRGY
LAAVPGVDLGAVASVLAGSRSVFGHRGVLVGGELVSGVALSGPRVVFVFSGQGSQCVGMGERLAGVFPVFAEVYGRV
WDLLDVPGSGLGVDDTGFVQPALFALQVGLFGLLESWGVRPEVVVGHSVGEVAAGYVAGLWSLEDACVLVSARARLM
QGLPGGGVMVSVSVSEERARAALVEGVEIAAVNGPSSVVLSGDEAAVVGVAEGLGGRWRRLATSHAFHSARMDPMLD
EFRVVAEGLEYREPRIVMAGGAGVVSPEYWVRQVRDTVRFGDQVAAYQGDAVFVEVGPGGSLARLIDGVAVGDGEDE
VRAAVMAVAELFVRGVDVDWPAVVGTTATPVDLPTYPFQRQRYWTASWLVALEPEERGQALLRMVREGASVVLGHAD
ARAVEVDRAFRDLGVDSLTAVQVRNNLAKATGLRLPATMVFDYPTPAALAARLD
SEQ ID NO: 70
EPLAIVGMACRLPGGVASPEDLWRLVESGTDVISGFPTDRGWDLDNLYDPDPAVGKSYCVQGYFLDDVADFDASFFG
ISPREALAMDPQQRLILEASWEAFERAGIEPGSVRGSDTGVFMGAFSSGYGIGADHSGFGMTAGAGSVLSGRISYLF
GLEGPAMTVDTACSSSLVALHQASSALRQGECSLALVGGVTVMPTPQTFLEFARQRGLAADGRSKAFSDAADGSGFS
EGVGVLVVERLSDARARGHRVLAVVRGSAVNQDGASNGLSAPNGPSQQRVIRQALANAGLSSADVDVVEAHGTGTRL
GDPIEAQAVIETYGQDRERPLLLGSLKSNIGHTQAAAGVSAVIKMVMALRHGVVPQTLHVDEPSRHVDWTAGAVQLA
TEKQPWPASDRARRAGVSSFGISGTNAHVILESAPVHSVETDETAPMALASDVVPLVVSAKTSGALVDIEERLRGYL
AVAGSEVDLGAVASVLAGSRSVFGHRGVLVGGELVSGVALSGPRVVFVFSGQGSQCVGMGERLAGVFPVFAEVYGRV
WDLLDVPGSGLGVDDTGFVQPALFALQVGLFGLLESWGVRPEVVVGHSVGEVAAGYVAGLWSLEDACVLVSARARLM
QGLPGGGVMVSVSVSEERARAALVEGVEIAAVNGPSSVVLSGDEAAVVGVAEGLGGRWRRLATSHAFHSARMDPMLD
EFRVVAEGLEYREPRIVMAGGAGVVSPEYWVRQVRDTVRFGDQVAAYQGDAVFVEVGPGGSLARLIDGVAVGDGEDE
VRAAVMAVAELFVRGVDVDWPAVVGTTAAPVDLPTYPFQRQRYWTQTWLTGLASEDRRQALLKVVRDSAATVLGHAD
AGMIPATAAFKDLGLDSLTAVELRNSLGKSTGLSLPATMVFDYPTPDALADRLD
SEQ ID NO: 71
EPLAIVGMACRLPGGVASPEDLWRLVESGTDAISDFPTDRGWDVEGLYDPDPDAPGKSYAVKGGFLDAAGFDAAFFG
ISPREALAMDPQQRLVLEASWEAFERAGIEPGSVRGSDTGVFMGAFPAGYGGDREGFGATAGAGSVLSGRVSYFFGL
EGPAITVDTACSSSLVALHQAGYSLRQGECSLALVGGATVMATPQTFVEFSRQRGLSVDGRSKAFADAADGTGWAEG
VGVLVVERLSDAQAKGHQVLAVVRGSAVNQDGASNGLTAPNGPSQQRVIRQALANAGLSSADVDVVEAHGTGTKLGD
PIEAQAVIATYGQDRERPLLLGSLKSNIGHTQAAAGVSGVIKMVMALQHGVVPQTLHVDEPSRHVDWAAGAVELVTE
NQPWPVAERARRAGVSSFGISGTNAHVILESAPAEAASASEPVTPPSEASVPVVASDVVPLVVSAKTPGALTDIEER
LRGYLAAASDVDMAAAASTLAATRSVFEHRAVLLGDDTITGIATPDPRVVFVFPGQGWQWLGMGSVLRETSPVFAGR
MAECAAALGEFVDWDLFSVLDDPTVVDRVDVLQPACWAVMVSLAAVWQEAGVSPDAVIGHSQGEIAAACVAGAVSLR
DAARIVALRSKLIGARLGHGAMASIALPAGDVALVDGAWIAAHNGPASTVIAGTPQAVDTVLAAHEAQGIRVRRITV
DYASHSPQVEEIHAELLDATAAVGSQAPAVPWLSTVDGAWVEGPLDADYWYRNLREPVRFDQAVTLLQTQGETVFIE
VSASPALTPAMNDDAITVATLRRDDDSPARILTALAEAFVQGVGVDWPAVTGATTSRVDLPTYPFQHQRYWAWLAGL
APEARGQALLKVVRESAAVVLGHTGADTVPVTAAFKDLGLDSLTAVELRNSLGRSTGLRLPVTAVFDYPTPAALAAR
LD
SEQ ID NO: 72
EPLAIVGMACRLPGGVASPEDLWRLVESGRDVISDFPVDRGWDLDNLYDPDPAVGKTYCKRGGFLDAAAEFDAAFFG
ISPREAAAMDPQQRLVLEASWEAFERAGIEPGSVRGSDTGVFMGAFANEYGAGADFGAFGMTAGAGSVLSGRVSYLF
GLEGPAMTVDTACSSSLVALHQAGSALRQGECSLALVGGVTVMPTPQLFVGFARERGLAVDGRSKAFSDAADGAGWA
EGVGVLVVERLSDAQARGHRVLAVVRGSAVNQDGASNGLTAPNGPSQQRVIRQALANAGLSSADVDVVEAHGTGTRL
GDPIEAQAVIATYGQDRERPLLLGSLKSNIGHTQAAAGVSGVIKMVMALRHSVVPRTLHVDEPSRHVDWAAGAVELV
TEKQPWPTSDRARRAGVSSFGISGTNAHVILESAPAQPLETDEALVPVVASDVMPLVVSAKTPDALTDIEDRLRAHL
AAAPEADMQAVASTLAATRSVFEHRAVLLGDDTITGVAASGPRVVFVFPGQGWQWLGMGSVLRETSPVFAGRMAECA
AALREFVDWDLFSVLDDPTVVDRVDVLQPACWAVMVSLAAVWQEAGVSPDAVIGHSQGEIAAACVAGAVSLQDAARI
VALRSKLIAHLAGHGAMASIALPADAITLTDGAWIAAHNGTASTVIAGTPQAVDTVLATHEAQGIRVRRITVDYASH
SPQVEEIHTELLDATATVGSQTPAVPWLSTVDNTWISRPLDTDYWYRNLREPVRFDQAVTLLQTQGETVFIEVSASP
ALTPAMNDDAVTVATLRRDDDSPTRILTALAEAFVQGVGVDWPAVTGATTTPVDLPTYPFQRQRYWTASWLAGLAPE
ARGQALLKVVRESTAVVLGHVDTETVPATAPFKDLGLDSLTAVQVRNGLAKATGLRLPATMVFDYPTPAALAARLD
SEQ ID NO: 73
EPLAIVGMACRLPGGVASPEDLWRLVESGTDAISDFPTDRGWDVEGLYDPDPDVPGKSYAVKGGFLDAAGFDAAFFG
ISPREALAMDPQQRLVLEASWEAFERAGIEPGSVRGSDIGVFMGAMANEYGAGADFGAFGMTAGAGSVLSGRVSYFF
GLEGPAMTVDTACSSSLVALHQAGSALRQGECSMALVGGVTVMPTPQTFVEFARQRGLATDGRSKAFADAADGSGFS
EGVGVLVVERLSDARARGHRVLAVVRGSAVNQDGASNGLSAPNGPSQQRVIRQALANAGLASADVDVVEAHGTGTRL
GDPIEAQAVIETYGQDRERPLLLGSLKSNIGHTQAAAGVSAVIKMVMALRHGVVPQTLHVDEPSRHVDWTAGAVQLA
TEKQPWPASDRARRAGVSSFGISGTNAHVILESAPVHSVETDETAPMALASDVVPLVVSAKTSGALVDIEERLRGYL
AAVPGVDLGAVASVLAGSRSVFGHRGVLVGGELVSGVALSGPRVVFVFSGQGSQCVGMGERLAGVFPVFAEVYGRVW
DLLDVPGSGLGVDDTGFVQPALFALQVGLFGLLESWGVRPEVVVGHSVGEVAAGYVAGLWSLEDACVLVSARARLMQ
GLPGGGVMVSVSVSEDRARAALVEGVEIAAVNGPSSVVLSGDEAAVVGVAEGLGGRWRRLATSHAFHSARMDPMLDE
FRVVAEGLEYREPRIVMAGGAGVVSPEYWVRQVRDTVRFGDQVAAYQGDAVFVEVGPGGSLARLIDGVAVGDGEDEV
RAAVMAVAELFVRGVDVDWPAVVGTTATPVDLPTYPFQRQRYWAWLTGLASEDRRQALLKVVRDSAATVLGHADARA
VEVDRAFRDLGVDSLTAVQVRNNLAKATGLRLPATMVFDYPTPAALAARLD
SEQ ID NO: 74
EPLAIVGMACRLPGGVASPEDLWRLVESGTDAISDFPTDRGWDVEGLYDPDPDVPGKSYAVKGGFLDAAGFDAAFFG
ISPREALAMDPQQRLVLEASWEAFERAGIEPGSVRGSDTGVFMGAFTNGYGTGADLDGFGATAGTGSVLSGRVSYFF
GLEGPAMTVDTACSSSLVALHQAGYSLRQGECSMALVGGVTVMPTPQTFVEFARQRGLATDGRSKAFADAADGSGFS
EGVGVLVVERLSDAQARGHRVLAVVRGSAVNQDGASNGLTAPNGPSQQRVIRQALANAGLASADVDVVEAHGTGTRL
GDPIEAQAVIETYGQDRERPLLLGSLKSNIGHTQAAAGVSGVIKMVMALQHGVVPQTLHVDEPSRHVDWSAGAVELA
RERQPWPVAGRARRAGVSSFGISGTNAHVILESAPVHSVETDETAPMALASDVVPLVVSAKTSGALVDIEERLRGYL
AAVPGVDLGAVASVLAGSRSVFGHRGVLVGGELVSGVALSGPRVVFVFSGQGSQCVGMGERLAGVFPVFAEVYGRVW
DLLDVPGSGLGVDDTGFVQPALFALQVGLFGLLESWGVRPEVVVGHSVGEVAAGYVAGLWSLEDACVLVSARARLMQ
GLPGGGVMVSVSVSEERARAALVEGVEIAAVNGPSSVVLSGDEAAVVGVAEGLGGRWRRLATSHAFHSARMDPMLDE
FRVVAEGLEYREPRIVMAGGAGVVSPEYWVRQVRDTVRFGDQVAAYQGDAVFVEVGPGGSLARLIDGVAVGDGEDEV
RAAVMAVAELFVRGVDVDWPAVVGTTATPVDLPTYPFQRQRYWAWLTGLASEDRRQALLKVVRDSAATVLGHADARA
VEVDRAFRDLGVDSLTAVQVRNNLAKATGLRLPATMVFDYPTPAALAARLD
SEQ ID NO: 75
EPLAIVGMACRLPGGVDSPEDLWRLVESGTDVISGFPTDRGWDLDNLYDPDPAVGKSYCVQGYFLDDVADFDASFFG
ISPREALAMDPQQRLILEASWEAFERAGIEPGSVRGSDTGVFMGAFSSGYGIGADHSGFGMTAGAGSVLSGRVSYLF
GLEGPAMTVDTACSSSLVALHQAGSALRQGECSLALVGGATVMPTPQTFVEFARQRGLATDGRSKAFADAADGAGWA
EGVGVLVVERLSDAQARGHRVLAVVRGSAVNQDGASNGLTAPNGPSQQRVIRQALANAGLSSADVDVVEAHGTGTRL
GDPIEAQAVIETYGQDRERPLLLGSLKSNIGHTQAAAGVSAVIKMVMALRHGVVPQTLHVDEPSRHVDWTAGAVQLA
TEKQPWPASDRARRAGVSSFGISGTNAHVILESAPAQPLETDEPSAPIVASDVVPLVVSAKTLDALTDIEDRLRGYL
AAASDVDMAAVASTLAATRSIFEHRAVLLGDDTITGIATPGPRVVFVFPGQGWQWLGMGSTLRETSPVFAARMAECA
AALREFVDWDLFSILDDPTVVDRVDVLQPACWAVMVSLAAVWQEAGVSPDAVIGHSQGEIAAACVAGAVSLQDAARI
VALRSKLIAHLAGHGAMASIALPADAITLTDGAWIAAHNGTASTVIAGTPQAVDTVLATHEAQGIRVRRITVDYASH
SPQVEEIHTELLDATTTINPRTPAVPWLSTVDNTWISRPLDTDYWYRNLREPVRFDQAVTLLQTRGETVFIEVSASP
ALTPAMNDDAITVATLRRDDDSPARILTALAEAFVQGVGVDWPAVTGATTARVLDLPTYAFQHQRYWATAWLAGLAP
AERGEALLKVVSDTVARVLGHADGRTIPATAAFKELGVDSLTAVELRNRLSAATGLRLPATMVFDYPSPGALAGWL
SEQ ID NO: 76
QPLAIVGMACRLPGGVASPEDLWRLVESGTDAISDFPVDRGWDLEGLYDPASDEPGVLYCDQGGFLDAAAGFDAAFF
GISPREAAAMDPQQRLVLEASWEAFERAGIEPGSVRGSDTGVFMGAMANGYGAGADLGGFGATAGAGSVLSGRISYF
FGLEGPAMTVDTACSSSLVALHQASFALRQGECSLALVGGVTVMPTPQTFVEFARQRGLAADGRSKAFSDAADGAGW
AEGVGVLVVERLSDAQAKGHQVLAVVRGSAVNQDGASNGLTAPNGPSQQRVIRQALANAGLSSAEVDVVEAHGTGTR
LGDPIEAQAVIATYGQDRERPLLLGSLKSNIGHAQAAAGVSGVIKMVMALRHGVVPQTLHVDEPSRHVDWAAGAVEL
VTENQPWPVAERARRAGVSSFGISGTNAHVILESAPAEAASASEPVTPPSEASVPVVASDVVPLVVSAKTPGALTDI
EERLRGYLAAAPEADMQAVASTLAATRSVFEHRAVLLGDDTITGVAASGPRVVFVFPGQGWQWLGMGSVLRETSPVF
AGQMAECAAALREFVDWDLFSVLDDPTVVDRVDVLQPACWAVMVSLAAVWQEAGVSPDAVIGHSQGEIAAACVAGAV
SLRDAARIVALRSKLIGARLGHGAMASIALPAGAITLTDGAWIAAHNGPASTVIAGTPQAVDAVLAAYEAQGIRVRR
ITVDYASHSPQVEEIRAELLDATATVGSQAPVVPWLSTVDGAWVEGPLDADYWYRNLREPVRFDQAVTLLQTQGETV
FIEVSASPALTPAMNDDAITVATLRRDDDSPARILTALAEAFVQGVGVDWPAATGATTSRVDLPTYPFQHQRYWTQT
LSGLAAAERRQALAKLVRESAAVVLGHADPDSVPAAAAFKDLGVDSLTAVELRNSLGRSTGLRLPATMVFDYPTPDA
LAARLD
SEQ ID NO: 77
EPLAIVGMACRLPGGVDSPEDLWRLVESGTDAISGFPTDRGWDLDSLYDPILGASGEFYSAQGGFLDRAADFDASFF
GISPREALAMDPQQRLVLEVSWEALERAGIEASSVRGSDTGVFMGAFSSGYGTGSDFGAFGATSSAGSVLSGRISYF
FGLEGPAMTVDTACSSSLVALHQAGSALRQGECSLALVGGITVMSTPLTFAEFARQRGLAPDGRSKAFSDAADGAGF
SEGVGVLVVERLSDAQAKGHRVLAVVRGSAVNQDGASNGLTAPNGPSQQRVIRQALANAGLASADVDVVEAHGTGTR
LGDPIEAQAVIATYGQDRERPLLLGSLKSNIGHAQAAAGVSGVIKMVMALRHGVVPQTLHVDEPSRHVDWAAGAVEL
VTENQPWPVAERARRAGVSSFGISGTNAHVILESAPAEAASASEPVTPPSEASVPVVASDVVPLVVSAKTPGALTDI
EERLRGYLAAASDVDMAVVASTLAATRSVFEHRAVLLGDDTITGVAASGPRVVFVFPGQGWQWLGMGSVLRETSPVF
AGRMAECAAALREFVDWDLFSVLDDPTVVDRVDVLQPACWAVMVSLAAVWQEAGVSPDAVIGHSQGEIAAACVAGAV
SLRDAARIVALRSKLIGARLGHGAMASIALPADAITLTDGAWIAAHNGPASTVIAGTPQAVDAVLAAYEAQGIRVRR
ITVDYASHSPQVEEIRAELLDATATVGSQAPVVPWLSTVDNTWISRPLDTDYWYRNLREPVRFDQAVTLLQTQGETV
FIEVSASPALTPAMNDDAITVATLRRDDDSPARILTALAEAFVQGVGVDWPAVTGATTARVLDLPTYPFQRQRYWAW
LTGLASEDRRQALLKVVRDSAATVLGHADARAVEVDRAFRDLGVDSLTAVQVRNNLAKATGLRLPATMVFDYPTPAA
LAARLD
SEQ ID NO: 78
EPLAIVGMACRLPGGVASPEDLWRLVESGTDVISGFPTDRGWDLDNLYDPDPAVGKSYCVQGYFLDDVADFDASFFG
ISPREALAMDPQQRLILEASWEAFERAGIEPGSVRGSDTGVFMGAFSSGYGIGADHSGFGMTAGAGSVLSGRISYLF
GLEGPAMTVDTACSSSLVALHQASSALRQGECSLALVGGATVLATPYGFVEISRQRGLAADGRSKAFSDAADGMSFS
EGAGVLVLERLSDAQAKGHRVLAVVRGSAVNQDGASNGLTAPNGPSQQRVIQQALANAGLASADVDVVEAHGTGTRL
GDPIEAQAVIATYGQNRERPVLLGSLKSNIGHTHAAAGVSGVIKMVMALQHGVVPRTLHVDAPSRHVDWAAGAVELV
TENQPWPVAERARRAGVSSFGISGTNAHVILESAPAQPLETGEPSAPIVASDVVPLVVSAKTPDALTDIEDRLRAHL
AAAPEADMQAVASTLAATRSIFEHRAVLLGDDTITGIATPDPRVVFVFPGQGWQWLGMGSTLRETSPVFAARMAECA
TALREFVDWDLFSILDDPTVVDRVDVLQPACWAVMVSLAAVWQEAGVSPDAVIGHSQGEIAAACVAGAVSLQDAARI
VALRSKLIAHLAGHGAMASIALPADAITLTDGAWIAAHNGPASTVIAGTPQAVDTVLATHEAQGIRVRRITVDYASH
SPQVEEIRAELLDATATVGSQAPVVPWLSTVDGAWVEGPLDADYWYRNLREPVRFDQAVTLLQTQGETVFIEVSASP
ALTPAMNDDAVTVATLRRDDDSPTRILTALAEAFVQGVGVDWPAVTGATTTPVDLPTYPFQRQRYWTASDRLSGRTS
GDQHRIMLELVLGHAASVLGHGAADAVAADKPFKDLGMDSLTAIELRNHLVAETGLRLPATTAFDHPTADDLARRL
SEQ ID NO: 79
EPIAIVSMACRAPGGVDSPDGLWRLVESGTDAISGFPTDRGWDVADLYSPDPAGYKSYCVQGGFLDTAADFDAAFFG
ISPREALGMDPQQRLLLEASWEAIERARIDPRSLRGRSVGVFVGGASQGYGAGADDQQQSNAITGGSISLLSGRVSY
ALGLEGPGVTVDTACSSSLVALHLASQALRQRECSLALVSGVSVMATPDVFVEFSRQRGLAPDGRCKSFSAAADGTG
WSEGVGVLVLERLSEATRLGHRVHAVVRGSAVNSDGASNGLTAPNGASQQKVIRQALANAGLAASEVDAVEAHGTGT
KLGDPIEAEAILATYGQDRAAPVWLGSLKSNIGHTMAASGVLGVIKMVESMRHGLLPRTLNVDEPSPHVDWASGDVA
LLTENQPWPADVGPRRAAVSSFGISGSNAHVVLEQYGEPAGPDLSDLTNTRAVNAADAPDRRQPVPLMLSARSQRAL
REQAGRLHAALAGAPDWRPLDIGYSLATTRSHFTHRAVAVGSGRELLRALSKLADGADWPALTTRIAKSRRVAFLFD
GQGTQRLGMGSGLYAGFPVFAGVWDQVSAAFDKHLDHSLTDVFLGRDDRPAAAELVDDTLYAQAGLFTLEVALFRLL
EEWGVRPDFLAGHSIGEAAAAYAGGMFSLEDVTALIVARGEALRLAPPGAMLALRASEEEVREFLGRTGAELDLAAV
NGPASVVVSGASEAVADFRARWTAAGRKARELNVSRAFHSRHVEAGLGRFREVLESLTFGTPVLPIVSTVTGQLVDP
VEMSTPEYWLRQVRQPVLFQDALRELSGQGVNTFVEIGPSGTLASAGLECLGGDASFHAVQQPRSPQDVGLMTAVAE
LHAGGTAVDWAKALAGGRATDLPVYPFQHESYWLAPADYAYPEEPGTMLELVRLEAAKVLGITEPDTILEETSFLDL
GFDSLGTMRLRNRLSEVTELDLPATLLFDNPSPAELAAYLD
SEQ ID NO: 80
EPLAIVGMACRLPGGVSSPEDLWRLVESGTDAISHFPTDRGWDLDNLYDPDPDAPGKGYRVQGGFLDAAGFDAAFFG
ISPREAQAMDPQQRLVLEASWEAFERAGIDPGAMRGSHTGVFMGAMANGYGAGADLGGFGATAGAVSVLSGRVSYLF
GLEGPAMTVDTACSSSLVALHQAAYSLRQGECSLALVGGVTVMPTPQMFVEFARQRGLAADGRSKAFADAADGAGFS
EGVGVLVVERLSDAQAKGHRVLAVVRGSAVNQDGASNGLSAPNGPSQQRVIRQALANARLAPNEIDVVEAHGTGTTL
GDPIEAQALIAAYGQDREQPVLLGSLKSNIGHTQAAAGVSGVIKMVMALQHGVVPRTLHVDSPSRHVDWTAGAVELV
TENQPWPAIDRARRAGVSSFGISGTNAHVILESAPAQPVVETEEVPAPPVVASDMMPLVISAKTPSALVEFEGRLRA
YLTSTPGVDMRAVASTLAGTRSVFEHRAVLLGDETVTGPGTGAGSGVAVSDPRVVFVFPGQGSQRAGMGEQLAAVFP
VFAEIHQQVWDLLDVPDPGLDTDETGYAQPSLFALQVALFGLLESWGVRPQAVIGHSVGEIAAGYVAGLWSLRDACT
LVSARARLMQTLPTGGAMVAVPVSEKQAQAALTDGVEIAAVNGPSSVVLTGDETAVLETAAALGRSTRLTTSHAFHS
ARMEPVLDEFRTVAETLDYRTPHIPMAAGDAVVTPEYWVRQIRDTVRFGDQVAAHENAVFVEIGPDRTLSRLTDGIA
MLHGDNETQTAITALATLHTHGVNIHWPAVIGATTARVLDMPTYAFQHQRYWTTWLAGLAPEERKQALLKVVRDSAA
AVLGHAGADTVPVTAAFKDLGLDSLTAVELRNSLGKSTGLRLPATMVFDYPNPTTLAARLD
SEQ ID NO: 81
EPLAIVGMACRLPGGVSSPEDLWRLVESGTDAISGFPTDRGWDIENLYDPDPDAPGKGYRVQGGFLDRAAEFDASFF
GISPREAQAMDPQQRLVLETSWEAFERAGIEPGAMRGSDTGVFMGAMANGYGTGADLGAFGMTSAAVSVLSGRVSYL
FGLEGPAMTVDTACSSSLVALHQAAYSLRQGECSLALVGGVTVMPTPQTFVEFARQRGLAADGRSKAFSDAADGAGF
SEGVGVLVVERLSDARAKGHHVLAVVRGSAVNQDGASNGLSAPNGPSQQRVIRQALDNAGLSSTDVDVVEAHGTGTT
LGDPIEAQALIAAYGQDREQPVLLGSLKSNIGHTQAAAGVSGVIKMVMALQHGVVPRTLHVDSPSRHVDWTAGAVEL
VTENQPWPAIDRARRAGVSSFGISGTNAHVILESAPDLPVVETEETPAPVVTSDMMPLVISAKTPAALADMEGRLRS
YLTSMPGVDMRAVASTLAGTRSVFEHRAVLLGDETVTGPGTGVAVSGPRVVFVFPGQGSQRAGMGEQLAAVFPVFAE
IHQQVWDLLDVPDPGLGADETGFAQPSLFALQVALFGLLESWGVRPQAVIGHSVGEIAAGYVAGLWSLRDACTLVSA
RARLMQTLPTGGAMVAVPVSEKQAQAALTDGVEIAAVNGPSSVVLTGDETAVLETAAALGKSTRLTTSHAFHSARME
PVLDQFRTVAETLDYRTPHIPMAAGDAVVTPEYWVRQIRDTVRFGDQVAAHENAVFVEIGPDRTLSRLTDGIAMLHG
DNETQTAITALATLHTHGVNIHWPAVIGATTTPVDLPTYAFERQRYWAWLAGLAPEERKQALLKTVRDNAAKVLGHA
DARDIAVNTAFRDLGLDSLTAVQVRNSLAKATGLRLPTTTVFDYPNPTALATHLD
SEQ ID NO: 82
EPLAIVGMACRLPGGVSSPEDLWRLVESGTDAISDFPTDRGWDLDNLYDPDPDTPGKAHNVQGGFLDAAGFDASFFG
ISPREAQAMDPQQRLVLETSWEAFERAGIDPASVRGSDTGVFMGAFGSGYGTGADLGGFGATAGAVSVLSGRVSYLF
GLEGPAMTVDTACSSSLVALHQASSALRQDECSLALVGGVTVMPTPQTFVEFARQRGLAADGRSKAFADAADGAGFS
EGVGVLVVERLSDARAKGHRVLAVVRGSAVNQDGASNGLTAPNGPSQQRVIQSALDNAGLSSTDVDVVEAHGTGTTL
GDPIEAQALIAAYGQDREQPVLLGSLKSNIGHTQAAAGVSGVIKMVMALQHGVVPRTLHVDEPSRHVDWTAGAVELV
TENQPWPAIDRARRAGVSSFGISGTNAHVILESAPDLPVVETEEVPAPPVVASDLMPLVISAKTPSALADMEGRLRA
YLTATPGVDMRAVASTLAGTRSVFEHRAVLLGDDTVTGPGVAVSGPRVVFVFPGQGSQRAGMGEQLAAVFPVFAEIH
QQVWDLLDVPDPGLDTDETGFAQPSLFALQVALFGLLESWGVRPQAVIGHSVGEIAAGYVAGLWSLRDACTLVSARA
RLMQTLPTGGAMVAVPVSEKQAQAALTDGVEIAAVNGPSSVVLTGDETAVLETAAALGKSTRLTTSHAFHSARMEPV
LDQFRTVAETLDYRTPHIPMAAGDAVVTPEYWVRQIRDTVRFGDQVAAHENAVFVEIGPDRTLSRLTDGIAMLHGDN
ETQTAITALATLHTHGVNIHWPTIVGTTTPVLDLPTYAFQHQRYWTSWLAGLAPEERKQALLKTVRDSAAAVLGHVG
TDTVPATAAFKDLGLDSLTAVELRNSLGKSTGLRLPATMVFDYPNPTALAARLD
SEQ ID NO: 83
EPLAIVGMACRLPGGVSSPEDLWRLVESGTDAISGFPTDRGWDIENLYDPDPALGRTYTVQGGFLDIAGFDAAFFGI
SPREAQAMDPQQRLVLEASWEAFERAGIEPGSMRGSDTGVFMGAFSSGYGAEHEGFGATAGAVSVLSGRVSYFFGLE
GPALTVDTACSSSLVALHQAGYSLRQGECSLALVGGVTVMPTPQTFVEFSRQRGMAVDGRSKAFADAADGAGWAEGV
GVLVVERLSDARAKGHRVLAVVRGSAVNQDGASNGLSAPNGPSQQRVIRQALANAGLSSADVDVVEAHGTGTRLGDP
IEAQAVLATYGQDREQPLLLGSLKSNIGHAQAAAGVSGVIKMVMALQHGVVPRTLHVDSPSRHVDWTAGSVELVTEN
QPWPVLERARRVGVSSFGISGTNAHVILESAPDPDVAVVEVEETPAPPVVVISAKTPSALADMEGRLRAYLAARPGV
DVRAVASTLAGTRSVFEHRAVLLGDDTVTGTSTGTGSGAAVSGVAVSGPRVVFVFPGQGWQWLGMGCGLRETSAVFA
GRLAECAAALSEFVDWDLLTVLDDPSVVDRVDVLQPACWAVMVSLAAVWQEAGVVPDAVIGHSQGEIAAACVAGALT
LRDAARIVALRSRLIARLAGQGAMASIALPAHEIVLGDGAVVAARNGPAATVVAGTARAVERVLAVHEKEGARVRRI
TVDYASHSPQVEEIRTELLDILATTGSRTPVVPWLSTVDGTWTEQPLDPDYWYRNLREPVGFHPAVDTLRSMGETVF
IEISASPTLTPAMDDATTVATLRRDNDTPQQILTALAEAHTHGVNIHWPAIIGTTTTPARVDLPTYAFQHQRYWTSW
LAGLAPEERKQALLKMVRDSAAAVLGHAGADTVPVTAAFKDLGLDSLTAVELRNSLGKSTGLRLPVTMVFDYPNPTT
LAARLD
SEQ ID NO: 84
EPLAIVGMACRLPGGVSSPEDLWRLVESGTDAISGFPTDRGWDIENLYDPDPDAAGTTYTVQGGFLDIAGFDASFFG
ISPREALAMDPQQRLVLETSWEAFERAGIEPSSMRGSDTGVFMGAFTNGYGAGVDFGAFGGASAAVSVLSGRVSYFF
GLEGPAITVDTACSSSLVALHQAGSALRQGECSLALVGGVTVMPTPQLFVDFSRQRGLAADGRSKAFADPADGAGFS
EGVGVLVVERLSDAQAKGHRVLAVVRGSAVNQDGASNGLSAPNGPSQQRVIRQALDNARLAPNEIDAVEAHGTGTTL
GDPIEAQALIATYGQDREQPVLLGSLKSNIGHTQAAAGVSGVIKMVMALQHGVVPRTLHVDSPSRHVDWTAGAVELV
TENQPWPAIDRARRAGVSSFGISGTNAHVILESAPDPDVPVVETEETPPPPVVVISAKTPSALADMEGRLRAYLAAT
PGVDVRAVASTLAGTRSVFEHRAVLLGDDTVTGTSTGTGSGAAVSGVVVSGPRVVFVFPGQGWQWLGMGCGLRETSA
VFAGRLAECAAALSEFVDWDLLTVLDDPSVVDRVDVLQPACWAVMVSLAAVWQEAGVVPDAVIGHSQGEIAAACVAG
ALTLRDAARIVALRSRLIARLAGQGAMASIALPAHEIALGDGAVVAARNGRAATVIAGTARAVDRVLAVHEKEGARV
RRITVDYASHSPQVEEIRTELLDILATTGSRTPVVPWLSTVDGTWTEQPLDPDYWYRNLREPVGFHPAVDTLRSMGE
TVFIEISASPTLTPAMDDATTVATLRRDNDTPQQILTALAEAHTHGVNIHWPAIMGATTTRVDLPTYAFQHQRYWTS
WLAGLAPEERKQALLKVVRDSAAKVLGHAGADTVPVTAAFKDLGLDSLTAVELRNSLGKSTGLRLPATMVFDYPNPT
TLAARLD
SEQ ID NO: 85
EPLAIVGMACRLPGGVSSPEDLWRLVESGTDAISGFPTDRGWDIENLYDPDPDAPGKGYRVQGGFLDRAAEFDASFF
GISPREAQAMDPQQRLVLETSWEAFERAGIEPGAMRGSDTGVFMGAMANGYGTGADLGAFGMTSAAVSVLSGRVSYL
FGLEGPAMTVDTACSSSLVALHQAAYSLRQGECSLALVGGVTVMPTPQTFVEFARQRGLAADGRSKAFSDAADGAGF
SEGVGVLVVERLSDARAKGHHVLAVVRGSAVNQDGASNGLSAPNGPSQQRVIRQALDNAGLSSTDVDVVEAHGTGTT
LGDPIEAQALIATYGQDREQPVLLGSLKSNIGHTQAAAGVSGVIKMVMALQHGVVPRTLHVDSPSRHVDWTAGAVEL
VTENQPWPAIDRARRVGVSSFGISGTNAHVILESAPAQPVVETEEVPAPPVVASDMMPLVISAKTPSALVEFEGRLR
AYLTSTPGVDMRAVASTLAGTRSVFEHRAVLLGDDTVTGPDTGTGAGSGVAVSDPRVVFVFPGQGSQRAGMGEQLAA
VFPVFAEIHQQVWDLLDVPDPGLGADETGFAQPSLFALQVALFGLLESWGVRPQAVIGHSVGEIAAGYVAGLWSLRD
ACTLVSARARLMQTLPTGGAMVAVPVSEKQAQAALTDGVEIAAVNGPSSVVLTGDETAVLETAAALGKSTRLTTSHA
FHSARMEPVLDQFRTVAETLDYRTPHIPMAAGDAVVTPEYWVRQIRDTVRFGDQVAAHENAVFVEIGPDRTLSRLTD
GIAMLHGDNETQTAITALATLHTHGVNIHWPAVIGATTARVLDLPTYAFERQRYWAWLAGLAPEERKQALLKVVRDS
AAAVLGHADARDIAVNTAFRDLGLDSLTAVQVRNSLAKATGLRLPTTTVFDYPNPTALATHLD
SEQ ID NO: 86
EPLAIVGMACRLPGGVSSPEDLWRLVESGTDAISDFPTDRGWDLDNLYDPDPDTPGKAHNVQGGFLDAAGFDAAFFG
ISPREALAMDPQQRLVLETSWEAFERAGIDPASVRGSDTGVFMGAFGSGYGTGADLGGFGATAGAVSVLSGRVSYLF
GLEGPAMTVDTACSSSLVALHQASSALRQDECSLALVGGVTVMPTPQTFVEFARQRGLAADGRSKAFADAADGAGFS
EGVGVLVVERLSDARAKGHRVLAVVRGSAVNQDGASNGLTAPNGPSQQRVIRQALDNAGLSSTDVDVVEAHGTGTRL
GDPIEAQALIATYGQDREQPVLLGSLKSNIGHTQAAAGVSGVIKMVMALQHGVVPRTLHVDSPSRHVDWTAGAVELV
TENQPWPAIDRARRVGVSSFGISGTNAHVILESAPAQPVVETEEVPAPPVVASDMMPLVISAKTPSALVEFEGRLRA
YLTSTPGVDMRAVASTLAGTRSVFEHRAVLLGDDTVTGPDTGTGAGSGVAVSDPRVVFVFPGQGSQRAGMGEQLAAV
FPVFAEIHQQVWDLLDVPDPGLDTDETGYAQPSLFALQVALFGLLESWGVRPQAVIGHSVGEIAAGYVAGLWSLRDA
CTLVSARARLMQTLPTGGAMVAVPVSEKQAQAALTDGVEIAAVNGPSSVVLTGDETAVLETAAALGRSTRLTTSHAF
HSARMEPVLDEFRTVAETLDYRTPHIPMAAGDAVVTPEYWVRQIRDTVRFGDQVAAHENAVFVEIGPDRTLSRLTDG
IAMLHGDNETQTAITALATLHTHGVNIHWPAVIGATTARVLDMPTYAFQHQRYWTTWLAGLTPEERKQALLKTVRDS
AAAVLGHADARDIAVNTAFRDLGLDSLTAVQVRNSLAKATGLRLPTTTVFDYPNPTALATHLD
SEQ ID NO: 87
EPLAIVGMACRLPGGVSSPEDLWQLVESGTDAISHFPTDRGWDIDNLYDPDPDTPGKTYCVQGYFLDGIAEFDASFF
GTSPREALAMDPQQRLVLETSWEAFERAGIDPASVRGSDTGVFMGAFSSGYGTGADLGGFGATAGAGSVLSGRVSYL
FGLEGPAMTVDTACSSSLVALHQAGYSLRQGECSLALVGGVTVMPTPQAFVEFSRQRGLAADGRSKAFADAADGAGW
AEGVGVLVVERLSDARAKGHRVLAVVRGSAVNQDGASNGLTAPNGPSQQRVIRSALDNARLAPNEIDVVEAHGTGTR
LGDPIEAQALIAAYGQDREQPVLLGSLKSNIGHTQAAAGVSGVIKMVMALQHGVVPRTLHVDEPSRHVDWTAGAVEL
VTENQPWPAIDRARRAGVSSFGISGTNAHVILESPPAQPVVETEEVPAPPVVASDMMPLVISAKTPSALADMEGRLR
AYLAARPGVDVRAVASTLAGTRSVFEHRAVLLGDDTVTGTSTGTGSGAAVSGVVVSGPRVVFVFPGQGWQWLGMGCG
LRETSAVFAGRLAECAAALSEFVDWDLLTVLDDPSVVDRVDVLQPACWAVMVSLAAVWQEAGVVPDAVIGHSQGEIA
AACVAGALTLRDAARIVALRSRLIARLAGQGAMASIALPAHEIALGDGAVVAARNGPAATVIAGTPRAVDRVLAVHE
KEGARVRRITVDYASHSPQVEEIRTELLDILATTGSRTPVVPWLSTVDGTWTEQPLDPDYWYRNLREPVGFHPAVDT
LRSMGETVFIEISASPTLTPAMDDATTVATLRRDNDTPRQILTALAEAHTHGVNIHWPTVIGTTTTPARVDLPTYAF
QHQRYWTSWLAGLAPAERDEALLKMVRDSAALVLGHAGGRTIPVAAAFKDLGVDSLTAVELRNRLSAATGLRLPATL
VFDYPNPAALAGWL
SEQ ID NO: 88
QPLAIVGMACRLPGGVSSPEDLWRLVESGTDAISDFPTDRGWDIENLYDPDSPGEGEAYSAQGGFLDAAGFDAAFFG
ISPREAQAMDPQQRLVLEASWEAFERAGIDPGAMRGSHTGVFMGAMANGYGAGADLGGFGATAGAGSVLSGRISYLF
GLEGPAMTVDTACSSSLVALHQAAYSLRQGECSLALVGGVTVMATTQTFVEFARQRGLAADGRSKAFADAADGAGWA
EGVGVLVVERLSDARAKGHRVLAVVRGSAVNQDGASNGLTAPNGPSQQRVIRSALDNAGLSSADVDVVEAHGTGTTL
GDPIEAQALIAAYGQDREQPVLLGSLKSNIGHAQAAAGVSGVIKMVMALQHGVVPRTLHVDSPSRHVDWTAGAVELV
TENQPWPVTERARRAGVSSFGISGTNAHVILESAPDPDVPVVETEKVPAPPVVVISAKTPSALVEFEGRLRAYLAAR
PGVDVRAVASTLAGTRSVFGHRAVLLGDDTVTGTSTGTGSGAAVSGVVVSGPRVVFVFPGQGWQWLGMGCGLRETSA
VFAGRLAECAAALSEFVDWDLLTVLDDPSVVDRVDVLQPACWAVMVSLAAVWQEAGVVPDAVIGHSQGEIAAACVAG
ALTLRDAARIVALRSRLIARLAGQGAMASIALPAHEIALGDGAVVAALNGPAATVIAGTPRAVDRVLAVHEKEGARV
RRITVDYASHSPQVEEIRTELLDILATTGSRTPVVPWLSTVDGTWTEQPLDPDYWYRNLREPVGFHPAVDTLRSMGE
TVFIEISASPTLTPAMDDATTVATLRRDNDTPQQILTALAEAHTHGVNIHWPTVMGATTTRVDLPTYAFQHQRYWTS
WLAGLAPEERKQALLKVVRDSAAAVLGHAGTDTVPVTAAFKDLGLDSLTAVELRNSLGKSTGLRLPATLVFDYPNPT
TLAARLD
SEQ ID NO: 89
EPLAIVGMACRLPGGVSSPEDLWRLVESGTDAISGFPTDRGWDIENLYDPDPDAPGTGYRVQGGFLDRAAEFDASFF
GISPREALAMDPQQRLVLETSWEAFERAGIEPGSVRGSDTGVFMGAFSSGYGTGADFGAFGATSAAVSVLSGRVSYF
FGLEGPAMTVDTACSSSLVALHQAGSALRQGECSLALVGGVTVMSTPLTFAEFARQRGLAADGRSKAFADAADGAGF
SEGVGVLVVERLSDARAKGHRVLAVVRGSAVNQDGASNGLSAPNGPSQQRVIRQALANAGLSSADVDVVEAHGTGTR
LGDPIEAQAVLATYGQDREQPLLLGSLKSNIGHTQAAAGVSGVIKMVMALQHGVVPRTLHVDSPSRHVDWTAGAVEL
VTENQPWPVLERARRAGVSSFGISGTNAHVILESAPDPDLPVVEVEETPAPVVAVISAKTPSALVEFEGRLRTYLTA
RPGVDVRAVASTLAGTRSVFGHRAVLLGDDTVTGTGPGAAVSGVVVSGPRVVFVFPGQGWQWLGMGCGLRETSAVFA
GRLAECAAALSEFVDWDLLTVLDDPSVVDRVDVLQPACWAVMVSLAAVWQEAGVVPDAVIGHSQGEIAAACVAGALT
LRDAARIVALRSRLIARLAGQGAMASIALPAHEIALGDGAVVAARNGPAATVIAGTPRAVDRVLAVHEKQGARVRRI
TVDYASHSPQVEEIRTELLDILATTGSRTPVVPWLSTVDGTWTEQPLDPDYWYRNLREPVGFHPAVDTLRSMGETVF
IEISASPTLTPAMDDATTVATLRRDNDTPQQILTALAEAHTHGVNIHWPTVMGATTTPVRVDLPTYAFERQRYWAWL
AGLTPEERKQALLKTVRDSAAAVLGHTDARDIAMNTAFRDLGLDSLTAVQVRNSLAKATGLRLPTTTVFDYPNPTAL
ATHLD
SEQ ID NO: 90
EPLAIVGMACRLPGGVSSPEDLWQLVESGTDAISHFPTDRGWDIDNLYDPDPDTPGKTYCVQGYFLDGIAEFDASFF
GISPREAQAMDPQQRLVLETSWEAFERAGIDPASVRGSDTGVFMGAFGSGYGTGADLGGFGMTAGAGSVLSGRVSYF
FGLEGPAMTVDTACSSSLVALHQASSALRQGECSLALVGGTTVLATPYGLVEISRQRGLAADGRSKAFSDAADGMGF
SEGVGVLVVERLSDARAKGHRVLAVVRGSAVNQDGASNGLTAPNGPSQQRVIRSALDNAGLSSADVDVVEAHGTGTR
LGDPIEAQAVLATYGQDREQPLLLGSLKSNIGHTHAAAGVSGVIKMVMALQHGVVPRTLHVDEPSRHVDWTAGAVEL
VTENQPWPAIDRARRAGVSSFGISGTNAHVILESPPAQPVVEVEETPAPPVVASDMMPLVISAKTPSALADMEGRLR
AYLAARPGVDVRAVASTLAGTRSVFEHRAVLLGDDTVTGTSTGTGSGAAVSGVVVSGPRVVFVFPGQGWQWLGMGCG
LRETSAVFAGRLAECAAALSEFVDWDLLTVLDDPSVVDRVDVLQPACWAVMVSLAAVWQEAGVVPDAVIGHSQGEIA
AACVAGALTLRDAARIVALRSRLIARLAGQGAMASIALPAHEIALGDGAVVAARNGRAATVIAGTARAVDRVLAVHE
KEGARVRRIAVDYASHSPQVEEIRTELLDILATTGSRTPVVPWLSTVDGTWTEQPLDPDYWYRNLREPVGFHPAVDT
LRSMGETVFIEISASPTLTPAMDDATTVATLRRDNDTPRQILTALAEAHTHGVNIHWPTVIGTTTTPARVDLPTYAF
QHQRYWTSDRLNGRTGLEQHRVMLELVLGHAASVLGHSAPDAIAADRPFKDLGMDSLTAIELRNHLVAETGLRLPAT
TAFDHPTADDLAKRL
SEQ ID NO: 91
EPIAIVSMACRVPGGVDSPEGLWHLVESGTDAISDFPTNRGWDVANLYSPDPAGYTSYCVQGGFLDSAADFDATFFG
ISPREALGMDPQQRLVLEASWEAIERAQIDPRSLRGSNVGVFVGGASQGYGASANEQQQSNAITGGSSSLLSGRVTY
ALGLEGPAVTVDTACSSSLVALHLASQSLRQRECSLALVSGVSVMATPDVFVEFSRQRGLAPDGRCKSFSASADGTG
WSEGVGVLVLERLSEATRLGHRVLAVVRGSAVNSDGASNGLTAPNGASQQRVIRQALANAGLTASQVDAVEAHGTGT
TLGDPIEAEALLATYGQDRSTPAWLGSLKSNIGHTMAASGVLGVIKMVEAMRHGLLPRTLHVDEPSPHVDWASGDIA
LLSESRPWPDGSTPRRAGVSSFGISGTNAHVVLEQYRDPAGPDTPTGSDTQTGPETTTEHGPLPLMLSARSPKALRE
QAGRLHAALVEAPRWRPLDIGYSLATTRSSFAHRAVAVGSDRELLRALSQLADGGTSPALVTATAKAGRVAFLFDGQ
GTQRLGMGSGLYERFPAFARTWDLVSAAFDKHLNHSLTDVFLGRSGSVTAELVDDTLYAQAGIFTMEVALFELLDEW
GIRPDFLTGHSIGEAAAAYGAGMLSLEDVTTLIVARGQALRLSPPGAMVALRASEEEVREFLDRTGAALDLAAVNSP
TSVVVSGAPDAVSDFRTAWTESGREARALNVRHAFHSRHVEAGLGRFREVLDSLTFRAPVLPVVSTVTGRLVEPAEM
STPEYWLRQVRQTVRFHDALRELSGRGVGTFVEIGPSGTLASAGLECLGGDAAFHAVQRPRSAEDVCLMTAVAELHA
GGTAVDWTKVLAGGRRTDLPVYPFQHEAYWLTPAEPSYAEEPLTTLELVCSEAANVLGITEPGILLEDSSFLDLGLD
SLGAMRLRNRLSELTELDLPATLLFDNPNPTDLAAYLD
SEQ ID NO: 92
EPLAIVGMAARFPGGVASADDLWRLVVSGGDAIGGFPTDRGWDLDELYDPDPAATGRSYVREGGFLSDATTFDASFF
RIGPREAKAMDPQQRLLLETSWEAFEHAGIRPETLRGTATAVFAGISLQDYGVLAGSDPELEGYAGTGNAPSVLSGR
LSYFYGLEGPAVTIDTACSSSLVALHLAGQSLRRDECTLAVVGGVTVMPSPNVFVEFSRQRGLAPDGRCKPFAAAAD
GTGWSEGAGVLVVERLSDARRNNRRILAVVRGSAVNQDGASSGLTAPHGPSQQRVIRAALAAAGLTAGDVDVVEAHG
TGTTLGDPIEAQGVLATYGDRKGAPVRLGSVKSNLGHTQAAAGVAGVIKMVQALRHGVMPRSLHIDEPSPHVDWTAG
RVELLTSNLPWPASERPRRAAVSSFGISGTNAHVILEQAFPATEPEPPFTPVVSGPELPLIFSAKDPDALAAQTRVT
DGPGVAYALATSRSMFDHRTVRLGDMTVTGIAVTDPEVVFVFPGQGTQWAGMGRDLMEASPVFAERMNECAAALEPY
LDLWAAIDAPDHVETLQPASWAMMVSLAAVWQAAGVQPAAVIGHSQGEIAAACVSGAISLQDAAAVVALRSKAIAAS
LGKGAMASIPLPADAIELTGEVWVAALNGPSSTVVAGVPEAVELVRARYEGRRIAVDYASHTPHVEALRGQVVSVPS
QAPVIPWFSTVDSGWVEGPLDDDYWFRNLRQPVQFGPAAAGFDNAVFIEVSARPVLIPALEASVTVPSLRRDDGGPE
RMLASLAQAFVAGVPVDWTTIVAPAPFVELPTYPFQGERYWIDPRTLDEVLAVVRDSAATVLGHTDPTAITPDRSFK
DLGFDSLAAVQLRNHLLTATGVRLSATAVFDFPTPVVLAGEV
SEQ ID NO: 93
EPIAVVGMACRLPGDVSSPEDLWRLVSEGRDAVGPFPADRGWEPGDAAYARVGGFVTGATGFDAGFFGISPREAQAM
DPQQRLLLEVAWEAFERAGIAPDELRGSDTGVFVGTYGQGYGELAVDGDAEGYVGIGNSGSVVSGRVSYFFGLEGPA
VTVDTACSSSLVALHQAAQALRQGECSLALVGGVTVMSSPLIFQEFARQGGLAADGRCKAFADGADGTGWGEGVGVL
VVERLSEAQRRGHTVLAVVRGSAVNQDGASNGLTAPNGPSQQRVIRAALASAGLGVGDVDLVEAHGTGTALGDPIEA
QALLATYGSDGSPVWLGSLKSNIGHTQAAAGVAGVIKAVEAMRHGVMPRTLHVDQPSSHVDWSAGAVELLTANRPWD
SGGRPRRAAVSSFGISGTNAHVILEESPSAPVPPEPGTAPLLLSARSPAALAQFESRTAGLRPSRDLASTLSRRALF
DHRAVVLPDGDTVRGGVGDAPLVFVFAGQGSQRADMGSRLAEEFPVFAAAYERVWSLLDVDESLEVDHTGFAQPALF
AFEVALAELLGVRPDAVIGHSVGELAAAYVAGAMSLEDACRLVSARARLMQALPSGGVMVSVRVSEEAARTVLRDGV
EIAAVNGPQAVVLSGDEDAVLAAAAELGEFKRLRTSHAFHSARMEPMLEEFRAVASTVAFDEPQIALSFVPSAEYFV
RQVRETVRFGEQVAAFAPGTLFVEVGPDGSLSRLTGGVSAAEPMKALAYLWVRGVGVDWTPYIGDGRLDDAPTYPFQ
PERYWPEQRRRARHGDFLALVTATAAVVLGHPEGTDIPADTPFQSLGLDSLSAVDLRNQLAQATGVRLSPTAVFDYP
TPRALAERL
SEQ ID NO: 94
DPIAIVGMACRYPGGVATADDLWDLVAEGGDAVGPFPVDRGWDLAALYDPDPEAAGKSYVREGGFLGGAADFDAAFF
GISPREALAMDPQQRLLLETAWEAFEHAGIDPLDLRRSDTGVFVGTMAQEYGGLVTDSAHGLEGWIGTGNSQSVMSG
RLSYFFGLQGPAVTVDTACSSSLVALHQAAQALRNGECALAVVGGVTVMSSPRTFQEFSRQRGMAPDGRCKPFAAAA
DGTGWSEGVGVLVVERLSEARRNGHAVLAVVRGTAVNQDGTSNGLTAPNGPAQQQVIRAALERAGLGVGDVDVVEAH
GTGTALGDPIEAQAILDTYGSRTGGEPVRLGSVKSNLGHTQAAAGVAGVIKMVQAMRHATMPRSLHIDEPSPHVDWA
SGAVELLTAERGWPATDRPRRAAVSSFGISGTNAHVIVEGVADPELSREASPGGPLPFVLSAPTAEALSAQETRLRR
FRVERPDVDERDIAITLAGRTGFAHRTVLIGDLTVSGVAVADRRVVFVFPGQGTQWAGMGRDLMAASPVFAERMNEC
AAALEPYLDLWEAIDSPDRVETLQPASWAVMVSLAAVWQAAGVQPAAVIGHSQGEIAAACVSGAISLQDAAAVVALR
SKAIGASLGKGAMASIPLPADAIELIDEVWIAALNGPSSTVVAGAPEAVEQIRARYDGRRIAVDYASHTPHVEALRG
QVVSVPSRAPAIPWFSTVDSAWVEDPLDEDYWFRNLRQPVQFGPAAAGFDNAVFIEVSARPVLIPALEDAVTVPTLR
RDDGGIDRLHASVAQAWTAGADVDWAALLPAGGRRIALPPYAFTHERFWPRRPTAAGQDLLTVVRTAAATVLGHRDA
ARVPADRAFKELGFDSLSAVQLRNELLTATGVRLSATAVFDHPTAAALAEAL
SEQ ID NO: 95
EPIAIVGMACRLPGDVSSPDELWELVEAGRDAVGPFPADRGWNLSTLFDPDPDAPGKSYVREGGFLTGAGLFDADFF
GISPREALAMDPQQRLLLEMAWEAFERAGIAPDELRGSDTGVYVGTYAQGYGELAAATAGEGFVGIGNSGSVVSGRV
SYFLGLEGPAVTVDTACSSSLVALHQAAQALRLGECSMALVGGVTVMASPLMFQEFSRQRGLSPDGRCKAFAESADG
TGWGEGVGVLVVERLSEARRRGHTVLAVVRGSAVNQDGASNGLTAPNGPSQQRVIRAALASAGLTVGDVDLVEGHGT
GTALGDPIEAQALLATYGSAGSPVWLGSLKSNIGHTQAAAGVAGVIKMVQAMRHGVMPRTLHVDQPSSHVDWSAGAV
ELLTANRPWDSGGRPRRAAVSSFGISGTNAHVILEGVPAPEPAAGDAETAPLVLSARTAPALTDLEARVSARPSSPD
LAATLAGRASFDHRAVVLPDGEVVRGRAGAAPVVLVFAGQGSQRADMASRLAGEFPVFAAAYERVWSLLDVDEALDT
DQTGFAQPALFAYEVALAELLNVRPDAVIGHSIGELAAAYTSGSLSLEDACRLVSARARLMQALPPGGAMVSVRVSE
EVAREVLRDGVEIAAVNGPQAVVLSGDEDAVLAAAAKLGEFKRLRTSHAFHSARMEPMLEEFRAVALTVEFREPEVA
LSFVPSAEYFVGQVRETVRFGEQVASFEPGTLFVEVGPDGSLSRLTGGVSAAEPLTALAYLWVHGVAIDWVPYLGGG
RLDLGAPTYPFQHERYWPARALAQLPPARRGRALLDLVQNRVAKTLGLVRPADPGRAFTDLGFTSLTALELRNSIAE
ETGLPMPASLVFDHPNARSLAGYLD
SEQ ID NO: 96
EPLAIVGMACRLPGGISSAEELWRLVAEGGDAIGPFPGDRGWDVDALYDPDPAAGHTYTRSGGFLPGATDFDAAFFG
ISPREAQAMDPQHRQLLETSWEALEHAGIDPAGLRGRDVGVFAGFSGQDYIAEMGVGPAEAGGYQVTGRAASVLSGR
LSYFYGLEGPAVTVDTACSSSLVALHLAGQSLRDGESSLALVGGVTVMSSPGLFVEFSRQRGLAPDGRCKAFSADAD
GTGWSEGVGVLVVERLSDARRNGHRILAVVRGSAVNQDGASNGLTAPNGPSQQRVIRQALAQSGLSVADVDVVEAHG
TGTALGDPIEAQAVLATYGGRAGGEPVRLGSLKSNIGHTQAAAGIASLIKMVQAIRYGVMPRTLHVSEPSPLVDWAS
GRVELLTSDIPWPDGVRRAAVSAFGISGTNAHVILEEAPAPAAVPSIRPVVSGPALPLVFSARDPSALAAQTRVTDG
PGVAYALATSRTMLDHRTVRLNDVTVTGIAVTDPEVVFVFPGQGSQWAGMGRDLMGSSPVFAERMNECAAALEPYLD
LWAAIDAPDRVETLQPASWAVMVSLAAVWQAAGVQPAAVIGHSQGEIAAACVSGAISLQDAAAVVALRSRAIAASLG
KGAMASIPLPADAIELADEVWVAALNGPSSTVVAGALEAVEQVRARYEGRRIAVDYASHTPHVEALRGQVVSVPSQA
PAIPWFSTVDSGWIEGPLDDDYWFRNLRQQVQFGPAAAGFDNAVFIEVSARPVLIPALDASVTVPSLRRDDGGPERM
LASLAQAFVAGVPVDWTTIVPPAPHVELPSYPFQRQRHWIDMERLGQLPPGDRDRFLLDLVRDAAAAVLGHGSRETV
PASAAFKELGFDSLIAVQLRNAVSAATGVRLPATVTFDHPTPQALAALL
SEQ ID NO: 97
EPLAIVGMACKFPGGVDSPERLWEMLEAGEDVIGPFPDDRGWDVDGGYDPDPEKAGSWYARAGGFLAGAADFDAAFF
GINPREALAMDPQQRLLLEVAWEAFERSGIAPDSLRGTDTGVFVGTFGQGYGRLVSAGAPGLEAYSGTGNTGSVASG
RLSYVFGLEGPAVTVDTACSSSLVALHQASQSLHRGECSLALVAGVTVMSTPDSFVEFSRQRGLSPDGRCKAFAAAA
DGTGFSEGAGVLVVERLSDAQRNGHQILAVVRGSAVNQDGASNGLTAPHGPSQQRVINTALTDADLTTTDIDLVEAH
GTGTTLGDPIEAQAILATYGNRTTGNPVHLGSVKSNLGHTQAAAGVAGVIKVIQAMRHATMPKSLHIDQPSPHVDWT
AGRVELLTGNRPWPATDRPRRAAVSSFGVSGTNAHVILEERAAAEEQPPAVDGPVPLVLSARTPEALTAQEEAVRGL
STDDRHRVAPALALGRAALPHRAVLLGDSVIRGTASADDGRPVFLFPGQGAQWAGMGRELMAASPVFAERMRECAVA
LAGFVDWDLFAVLDDAEALRRTEIVQPASWAVMVSLAALWESWGVHPAAVVGHSQGETAAAVVAGAIGLRDGARLSA
TRSRVLALLAGHGALASIALPAAEVEVVDGVSVAAVNGPRATLISGDPAGVEAVTARYEASGVRVRRIPADVASHSP
HVERAEETLLTALAGIEARVPGVPWLSTATGDWITEPVDERYWYRNLRSPVLFHPAITTLRDRGHRLFLEISTHPQL
LPAMEDDLLTVGSLRRDDGGPDRMHTALAEAWAGGADVDWPAVLGAGPVRALDLPTYPFQRRRFWPEAALPPVERDR
ALVEIVRDQAAAVLGHPDAGALTPGTAFRDLGFDSLTAVQLRNHLATATGLTLPATVIFDHPTPRALATFLD
SEQ ID NO: 98
EPLAVVGMACRLPGGVASPDQLWDLVVSGGDGIGPFPADRGWPTDDIFDPDPDAPGKTYVREGGFLDGAGEFDAAFF
GISPREALAMDPQQRLLLETSWEAFEHAGIDPAGLRGGDTGVFVGGFTQAYGVGTADLEGYAATGTVGSVLSGRLSY
FYGFEGPAVTVDTACSSSLVALHQAGQALRQGECTLAVVGGVTVMPTPVVFQEFSRQRGLATDGRCKAFADEADGTG
FAEGAGVLLVCRLSDARRDGRRILAVVRGSAVNQDGASNGLTAPHGPSQQRVIRAALANARLGPGDVDLIEGHGTGT
TLGDPIEAQALLATHGSGASPVRLGSLKSNIGHTQAAAGVAGVIKVIQALRNGLMPRTLHAGTPSSRVDWSAGNVEL
LTSNLPWPAADRPRRAAVSSFGISGTNAHVILEEAPAAAAVPTISPVVSGPALPLVFSARDPSALAAQTRVTEGPGV
AFALATTRSMFEHRAVRIGDFSVSGAAVADRRVVFVFPGQGTQWAGMGRDLMSASPVFAERMNECAAALEPYLDLWE
AIDSPDRVETLQPASWAVMVSLAAVWQAAGVQPAAVIGHSQGEIAAACVAGSITLQDAAAVVALRSRAIAASLGKGA
MASIPLPAEQIELAGEVWVAALNGPSSTVVAGLPEAVEQVRARYEGRRIAVDYASHTPHVEALRGQVVSVPSRAPAI
PWFSTVDSGWIEGPLDEDYWFRNLRQPVQFGPAAGRFDDAVFIEVSARPVLIPALEDAATVPSLRRDDGGGDRMLAS
LAQAFVAGVPVDWTTIIPPAPFVELPSYPFQHRRYWIDSSEDALRDLVREQAAAVLGYPDPSRITPGVAFRDLGFDS
LTAVQLRNALSAATGLRLSATVAFDHPTPAALAAAL
SEQ ID NO: 99
EPIAIVGMACRLPGGVSSPDELWELVESGRDAIGPFPADRGWNLDELYDPDPDAAGRSYVREGGFLTGAADFDAGFF
GINPREALAMDPQQRLVLEVAWEAFERAGIAPDSLRGTDTGVFLGAFAGGYLTLVNGAADLEGYAGTGNSVSVLSGR
LSYVLGLEGPAVTVDTACSSSLVALHQAAQALRLGECSLAVVGGVTVMSTPDSHVEFSRQRALSPDGRCKAFADGAD
GTGWAEGAGVLVVERLSEARRRGHTVLAVVRGSAVNQDGASNGLTAPNGPSQQRVIRAALASAGLGVGDVDLVEGHG
TGTALGDPIEAQALLATYGSDGSPVWLGSLKSNIGHTQAAAGVAGVIKAVESMRRGVMPQTLHVGTPSSHVDWAAGA
VELLTANRAWDSVERPRRAAVSSFGISGTNAHVILEGVPAPEPAAGSAESAPLLLSARSAAALAQFESLTSGLRPSR
DLASTLSRRAFFDHRAVVLPGGDVVRGRVGDAPVVLVFAGQGSQRADMASRLTAEFPVFAAAHERVWSLLDVDEGLG
IDQTGFAQPALFAYEVALAELLDVRPDAVIGHSIGELAAAYVAGAVSLEDACRLVSARARLMQALPPGGAMVSVRVS
EEAARAVLRDGVEIAAVNGPQAVVLSGDEDAVLAAAAELGEFKRLRTSHAFHSARMEPMLDEFRAVALTVEFREPEV
ALSFVPSAEYFVRQVRETVRFGEQVAAFAPGTLFVEVGPDGSLSRLTGGVSAAEPLTALAYLWVRGVGVEWTPYVGG
GILDQGAPTYPFQRERYWVRPRLAGRTTDERDALLIDLVRDDVASVLGHSGRRRLETDRPLLELGFDSLTALRLRNR
LAAATDVALPATLIFDYPNIQAIAVHL
SEQ ID NO: 100
EPLAVVGMACRYPGGVASADDLWRLVAAGGDAVGPFPDDRGWELESLVDPDPEAVGRSTTGQGGFLADAAGFDAAFF
GISPREATAMDPQQRLLLEVSWAALEHAGLRADALRGSATGVFMGSNGQDYAGLLAGAPELEGWIGTGVSASVVSGR
LSYFYGFEGPAVTVDTACSSSLVALHLAAQSLRTGESSLALVGGVTVMTSPTVFRSFSRQRGLAPDGRCKAFSAGAD
GTGWSEGVGVLVVERLSDAQRNGHQILAVVRGSAVNQDGASNGLTAPHGPSQQRVINTALTDADLTTTDIDLIEAHG
TGTTLGDPIEAQAILATYGNRTTGNPVHLGSVKSNLGHTQAAAGIAGIIKAIQAMRHATMPRTLHIDEPSPHVDWTA
GRVELLTSNLPWPATGRPRRAAVSSFGVSGTNAHVILEEAPAPAAVPSIRPVVSGPALPLVFSAKDPDALAEFQSHT
PAGEGVAYALATSRSTLDHRSVRIGDVTVTGIAVTDPEVVFVFPGQGTQWAGMGRDLMSASPVFAERMNECAAALEP
YLDLWAAIDAPDRVETLQPASWAMMVSLAAVWQAAGVQPAAVIGHSQGEIAAACVSGAISLQDAAAVVALRSKAIAA
SLGKGAMASIPLPADAIELTGEVWVAALNGPSSTVVAGVPEAVELVRARYEGRRIAVDYASHTPHVEALRGQVVSVP
SQAPVIPWFSTVDSGWVEGPLDDDYWFRNLRQPVQFGPAAAGFDNAVFIEVSARPVLIPALDASVTVPSLRRDDGGP
ERMLASLAQAFVAGVPVDWTTIVPPAPHVDLPSYPFQHQRFWIEGRVTAAAGAERLRIMLEVVLAETATVLGHGGAA
AIGPGRAFQDLGFDSLTAVELRNRLAAATGLTLPTTLVFNHPTPEALAAHL
SEQ ID NO: 101
EPVAIVGMACRLPGDVESPEDLWRLVAEGRDAVGPFPSDRGWNLGTLDDPDAAGRSYVKEGGFLAGAAHFDPAFFGI
GPREALGMDPQQRILLEIAWEALEHARIAPGDLRGSETGVYVGAAAQGYGVDAPLEGNLLTGGSTSAMSGRVAYALG
LHGPAVTVDTACSSSLVALHLAAQALRHGECTLALAGGVAVMASPVLFTEFSRQRGLAPDGRCKAFAAAADGTGWSE
GAGLVVLERLSDAERHGHRVLAVIRGSAVNSDGASNGLTAPNGTAQRRVIRSALRAAGLGAGDVDVVEAHGTGTTLG
DPVEADALIATYGQRSDTPPVRIGSLKSNIGHTVAAAGVAGVIKMVEAMRHGTMPRTLHVDRPTPHVDWSAGAAELL
TGELPWPRGDRPRRAAVSAFGLSGTNAHLILEDVAAAAEPPAGDDSGSGSETVPLLLSADDLPAVRDQAARLRAHLL
AHPELRMRDVAYALATTRTARPHRAAVTATERELLRELALLAAGDQGPGTQLGEAVPHRRVAFLFDGQGTQRHGMGR
ALHQRHPVFAAAWDEVCAALDPLLDRGVAEVYFAEAGRDLADDPLYTQAGLFALEVALYRLLTSWGVTPDAVAGHSV
GEVAVAHVAGVLSLPDAASLLAARGAALRQLPPGAMAAIRASEDDTRGVLPPDLDVAAVNGPEMTVVSGAEEAVDRF
VAEQAGAGRQVRRLRVGRAYHSRHVDAVLAEFGATLSALTFHEPTLPVVSTVTGRPAGAGDLTTPEYWLRHARRPVR
FGAALASLSELGMDSFVEVGPSGSLSSMAGETVAGTFHPLLDRRVPDEIGAAAAAGELFTAGMALDWTAVLAGGRPI
DLPVYPFRREFYWLGARYDLMAAAVRRDALLDLVRVQVALLLGRADAIGVRDNTSFLDVGLDSLGASRLRNRLAAAT
GLTLPGGLAFDHPTPARLADHLD
SEQ ID NO: 102
EPLAIVGMACRLPGGVWSPEDLWHLVASGTDAISDFPADRGWDVEKLFDPDPDAPGKTYCVQGGFLEATAAFDAAFF
GISPREALAMDPQQRLMLEVSWEAFERAGIEPGSVRGSDTGVFLGAYPGGYGAGAGADLGGFGATGGAGSVLSGRVS
YFFGLEGPAMTVDTACSSSLVALHQAAYSLRQRECSLALVGGVTVMGTPHMFVDFSRQRGLSVDGRCKAFADAADGT
SWSEGVGVLLVERLSDAQAKGHRVLAVVKGSAVNQDGASNGLTAPNGPSQQRVIRQALANADLAPHEVDVVEAHGTG
TTLGDPIEAQALLATYGQDREQPLLLGSLKSNVGHTQAAAGVSGVIKMVMALQHGVVPRTLHVDEPSRHVDWSAGAV
ELVTQNQPWPSSDRPRRAGVSSFGVSGTNAHIILESAPAQPLAPSTPITGLVPLVISAKTAPALTAFEARLRSYVTA
DADLTAIAATLATTRSTFEHRAVLLGDDTVTGIATPDPRVVFVFPGQGWQWLGMGSALRETSVVFKERMAECAAALS
EFVDWDLFSVLDDPAVVDRVDVVQPACWAVMVSLAATWQAAGARPDAVVGHSQGEIAAACVAGAISLQDGARVVALR
SQLIARLAGHGAMASIALPADQITLTDGVWIAARNGPAATVIAGAPEAVDSVLAAHQDARVRRITVDYASHTPHVEK
IRDELLPMLADIDSQTPLVPWLSTVDGLFIEGPLKADYWYRNLREQVGFDTAVNQLPDSIFIEVSASPVLLPGMGDA
LTVATLRRDEGGQERLVTALAEAYVQGVAVDWAAVIYNTTALVDLPTYPFQHEHYWLDSTRLMGLAAEERDKALVAV
VRESAAVVLGHADARAIPATAAFRELGVDSLTAVQLRNSLAKATGLRLPTTLAFDYPTPAVLAARL
SEQ ID NO: 103
EPLAIVGMACRLPGGVSSPEDLWRLVESGTDAISDLPTDRGWDLDNLYDPDPGAPGKSYCVQGGFLDTVADFDPAFF
GISPREALAMDPQQRLVLEVSWEAFERAGIEPGSVRGSDTGVFMGAFGNGYGIDTDGGGFGATAGTGSVLSGRVSYF
LGLEGPAMTVDTGCSSALVALHQARYALRQGDCSLALVGGVTVMASPYTFVEFSRQRGMAADGRCKAFADAADGTGW
AEGVGVLLVERLSDAEAKGHQVLAVVRGSALNQDGASNGLTAPNGPSQQRVIQAALANAGLVSADVDVVEAHGTGTT
LGDPIEAQAVLATYGQDRERPLLLGSLKSNIGHTQAAAGVSGVIKMVMALQHGVVPRTLHVDEPSRHVDWSAGAVEL
VTENQPWPSVDRPPRAGVSAFGISGTNAHVILEAVPAPPFEPPTPVTGPVPLVISAKTRPALTAFEARLRAYVTADA
DLTAIASTLATTRSIFEHRAVLLGDDTVTGIAVPDPRVVFVFPGQGWQWLGMGSALRESSVVFAERMAECAAALSDY
VDWDLFSVLDDPAVVDRVDVVQPACWAVMVSLAATWQAAGVRPDAVIGHSQGEIAAACVAGAISLRDAAQIVALRSQ
LIAGLAGHGAMASIALSADQITLTDGAWIAARNGPAATVIAGAPAAVDSVLAAHEDARTRRITVDYASHTPHVEQIR
TELLDLTTDLDSRAPVIPWLSTVDVTWVEGPLDADYWYRNLREPVGFDTAVENLPDSVFIEVSANPVLLPAMGDALT
VATLRRDAGGQTRLLTALAEAYVQGVAVDWVTVIGATPARVDLPTYAFQHQRYWVADRLHDRPSAEQHRLMRELVQR
HAATVLGHASPDTIAADRPFKDLGLDSLTAVELRNHLVAETGLRLSATTAFDHPTADDLAGHL
SEQ ID NO: 104
EPIAIVAMACRAPGGVSSPEGLWRLVESGTDATSGFPTDRGWDVDNLFDPDPDAAGKTYSVRGGFLETAADFDAAFF
GISPREALGMDPQQRLLLETSWEAIERAQIDPKSLRGRDVGVYVGGAAQGYGIGATDQQQENLITGSSISLLSGRVS
YALGLEGPGVTVDTACSSSLVALHLASQALRQRECSLALVSGVSVMATPDVFVEFSRQRGLAADGRCKSFSAAADGT
TWSEGVGVLVLQRLSEAVREGHRVLAVVRGSAVNSDGASNGLTAPNGVSQQRVIRQALAGAGLTASEVDVVEAHGTG
TKLGDPIEAEAILATYGQDRDAPAWLGSLKSNIGHTMAASGVLGVIKMVQAMRHGLLPRTLHVDEPSPHVDWARGDI
ALLTENQPWPDGTRPRRAGVSSFGLSGTNAHVVLEEYPAPVAAAPPVTPARGGPLPWVLSAQSPNALREQAARLYAA
LAEDPDWHPLDIGYSLATTRPGFPHRAVAVGSDREDFQRALSKLADGAGWPGLITATAAKDRRVAFLFDGQGTQRLG
MGRGLHRRFPVFARAWDAVSAAFAKHLDHSLTDIYLGESSPTNTDLADDTLYAQAGIFTLEVALVELLQDWGVRPDF
VTGHSIGEAAAAYVAGVLSLEDVTALIVARGKALRLTPPGDMVALRAGEADVRDFLNRTGAALDLAAVNSPEAVVVS
GTPDAVADFRAAWTASGGQARNLTVRHAFHSRHVESALDEFRTTLETLTFRAPKVPLVSTATGRLVGPAELGAPEYW
LRQVRQTVRFEDALRDLSGRGVGTFVEIGPSGSLATAGLECLGDDASFHAVQRPRSPEDVCLMTAVAELHAGGTTVD
WAKVLAGGRTVDLPVYPFQHRPYWIAPASYPDEPRTMRELVRLEVAGILGLSDPSVILDDSSFLELGFDSLSSLRLG
NRLATVTGLDLPSTLLFDYATPAALATHLD
SEQ ID NO: 105
EPLAIVGMACRLPGGVSTPEDLWRLVESGVDAISDFPADRGWDVANLFDPDPDAPGKTYSVRGGFLDTAADFDAAFF
GISPREALAMDPQQRLVLEASWEAFERAGIEPSSVRGSDTGVFMGAFSAGYGTELEGFGATAGAVSVLSGRVSYFFG
LEGPAMTVDTACSSSLVALHQAGYALRQGECSLALVGGVTVMASPQSFVEFSRQRGLSVDGRCKAFADAADGTGWAE
GVGVLVVERLSDAEAKGHRIQAMVRSSAVNQDGASNGLSAPNGPSQQRVIRQALANAGLTGADVDVVEAHGTGTTLG
DPIEAQALLATYGQDREQPLLLGSLKSNVGHTQAAAGVSGVIKMVMALQHGVVPRTLHVDEPSRHVDWSAGAVELVT
QNQPWPSFDRPRRAGVSSFGVSGTNAHIILESAPAQPLAPSTPIPGLVPLVISAKTAPALTAFEARLRDYLTADADL
TAIAATLATTRSTFEHRAVLLGDDTVTGIAAPDPRVVFVFPGQGWQWLGMGSALCESSVVFASRMAECAAALSEFVD
WDLFSVLDDPAVVDRVDVVQPACWAVMVSLAATWQAAGVHPDAVVGHSQGEIAAACLAGAISLQDGARVVALRSQLI
ARLAGHGAMASIALPADQIALTDGAWIAARNGPAATVIAGAPEAVDSVLAAHGDARVRRITVDYASHTPHVEQIRAE
LLAILADIDSRPPSIPWLSTVDDALVEGPLKADYWYRNLREPVGFDTAVSALQDAVFIEVSANPVLLPAMGDAATVA
TLRRDDGGQDRLLTAVAEAYVQGVAVDWAAVIGATGARVLDLPTYAFQHQRFWARAASAAGLAPEALLKVVQDSAAQ
VLGYADPGAIAVTAAFKDLGIDSLTAVEMRNTLAKKTGLRLPATLVFDYPTPGVLAGRL
SEQ ID NO: 106
EPLAIVGMACRLPGGVSSPEDLWRLVESGGDAISDFPADRGWDIENLFDPDPDAAGKTYSVRGGFLDAAAGFDAAFF
GISPREALAMDPQQRLVLEASWEAFERAGIEPGSVRGSDTGVFMGAYPGGYGTGADVGGFGATAGAVSVLSGRVSYF
FGLEGPAMTVDTACSSSLVALHQAGHALRQGECSLALVGGVTVMATPHTFIEFSRQQGLASDGRSKAFADAADGAGF
SEGVGVLVVERLSDARAKGHRVLAVVRSSAVNQDGASNGLTAPNGPSQQRVIRQALANAGLTGADVDVVEAHGTGTT
LGDPIEAQAVLATYGQDRQKPLLLGSLKSNVGHTQAAAGVSGVIKMVMALQHGVVPRTLHVDEPSRHVDWSAGAVEL
VTENQPWPSVDRPRRAGVSSFGISGTNAHVILESVPVQLPVPSAGLAPLMISAKTAPALGDAEARLRGYLTADADLP
AIASTLATTRSMFEHRAVLLGDTTITGTAAADPKVVFVFSGQGSQRAGMGEQLAFPVFADIHRRVWDLLDVPDLDVD
QTGYAQPALFALQVALAGLLESWGVRPQAVIGHSVGELAAGYVAGLWSLEDACTLVSARARLMQALPPGGVMVAVPV
SEDQARAALLEGVEIAAVNGPSSVVLSGDETAVLQVAAGLGKWTRLSTSHAFHSARMEPMLEEFRAVAEQVTYRTPV
ITMAAGAATPDYWVRQVRDTVRFGDQVAAFEGATFVEIGPDRTLARLVDGIAMLHGDDEVEAALTGLARLFVQGVPV
AWDNGARVLDLPTYPFQHQRYWLDARRAASAGGDLLKMVRDNAALILGHTNPGAISETTAFRDLGVDSLTAVQLRNS
LAKATGLRLPATLVFDYPTPSVLAGRL
SEQ ID NO: 107
EPLAIVGMACRLPGGVSSPEDLWRLVESGTDAISDFPADRGWDVDNLFDPDPDAPGKTYSVQGGFLDAAAEFDAAFF
GISPREALAMDPQQRLVLEASWEAFERAGIEPGSVRGSDTGVFMGAYSGGYGAGADLDGFGATAGAGSVLSGRISYF
FGLEGPAMTVDTACSSSLVALHQAGSALRQGECSLAVVGGVTVMATPDLFVEFSRQRGLAADGRCKAFGDAADGTGW
AEGVGVLLVERLSDAEAKGHRVLAVVRSSAVNQDGASNGLTAPNGPSQQRVIRSALATAGLAPQDVDVVEAHGTGTT
LGDPIEAQAVLATYGQDRERPLLLGSLKSNVGHTQAAAGVSGVIKMVMALQHGVVPRTLHVDEPSRHVDWSAGAVEL
VTQNQPWPDVDRPRRAAVSAFGVSGTNAHVILESVPAVPPVPSAGPAPLMISAKTAPALGDAEARLRDYLTADADLT
AIASTLATTRSTFEHRSVIFENHTITGTAAPDPRVVFVFSGQGSQRAGMGEQLAATFPVFAEIHRRVWDLLDGPDLD
VDQTGYAQPALFALQVALVGLLESWGVRPEAVIGHSVGELAAGYVSGLWSLEDACTLVSARARLMQALPPGGVMVAV
PVPEDQARAALVEGVEIAAVNGPSSVVLSGDEAAVLQVAAGLGKWTRLATSHAFHSARMEPMLEEFRGVAEQLTYRT
PVISMAAEVATPDYWVRQVRDTVRFGDQVAEFEGATFVEIGPDRTLARLIDGIAMLHGDDEVEAALNGLARLFVQGV
PVAWDNGGRVLDLPTYPFQRQRYWAVSPEALLKAVRDSAAMILGHADPSAISETAAFRDLGVDSLTAVELRNSLAKA
TGLRLPATLVFDYPTPAVLAARL
SEQ ID NO: 108
EPLAIVGMACRLPGGVSSPEDLWRLVESGTDAISDFPTDRGWDAASLFDPDPDAAGKTYSVQGGFLDAAADFDAAFF
GISPREALAMDPQQRLVLEASWEAFERAGIEPGSVRGTDTGVFMGAFSAGYGARLEGFGATAGAVSVLSGRVSYLFG
LEGPAMTVDTACSSSLVALHQAAYSLRQGECSLALVGGVTVMATPQIFVDFSRQRGLAPDGRCKAFGDNADGTGWAE
GVGVLVVERLSDAQAKGHRVLAVVRSSAVNQDGASNGLTAPNGPSQQRVIRQALANAGLTSADVDVVEAHGTGTTLG
DPIEAQAVLATYGQDRDRPLLLGSLKSNIGHTQAASGVSGVIKMVMALQHGVVPPTLHADQPSQHVDWSTGAVELVT
QSQPWPSVDRPRRAGVSSFGISGTNAHVILESVPAQPPVPSAGPAPLMISAKTAPALGEAEARLRDYLTADADLPAI
ASTLATTRSIFEHRAVLLGDTTITGTAAADPKVVFVFSGQGSQRAGMGEQLAFPVFADIHRRVWDLLDVPDLDVDQT
GYAQPALFALQVALAGLLESWGVRPQAVIGHSVGELAAGYVAGLWSLEDACTLVSARARLMQALPPGGVMVAVPVSE
EQARAALTEGVEIAAVNGPSSVVLSGDETAVLQVAAGLGKWTRLSTSHAFHSARMEPMLEEFRAVAEQLTYRTPTIT
MTEEVTTPDYWVRQVRDTVRFGDQVAAFEGATFVEIGPDRTLARLIDGIAMLHGDDETEAALTGLARLFVQGVPVTW
DNKARVLDLPTYPFQRQRYWAGWLAGLAAEERDKALVTVVRDSVAAVLGYADSRKIPVSAAFKDLGVDSLTAVELRN
SLAKTTGLRLPATLVFDHPTLATLAARL
SEQ ID NO: 109
EPLAIVGVACRLPGGVSSPEALWQLVESGTDAISGFPADRGWDVDNLFDPDPEASGKTYCVQGGFLDAVAEFDASFF
GISPREALAMDPQQRLILEVSWEAFERAGIEPGSVRGSNTGVFMGAFGSGYGSDLEGFSATAGAGSVLSGRISYFFG
LEGPAMTIDTACSSSLVALHQAGYALRQGECSLALVGGATVMATPQTFIEFSRQRGLAADGRCKSFGDNADGTGWSE
GVGALLVERLSDAQAKGHRVLAVVRGSAVNQDGASNGLTAPNGPSQQRVIRQALANAGLAPQDVDVVEAHGTGTRLG
DPIEAQAVLATYGQDRERPLLLGSLKSNVGHTQAAAGVSGVIKMVMALQHGVVPQTLHVDEPSRQVDWSAGAVELVT
ENQPWPDVDRPRRAAVSAFGVSGTNAHVILESAPAQPVAPSTPATGLTPLVISAKTAPALTASEARLRDYLTADADL
TAIAATLAATRSAFEHRAVLLGDDTVTGIAAPDPRVVFVFPGQGWQWLGMGSALRDSSVVFAERMAECAAALSDYVD
WDLFSVLDDPAVVDRVDVVQPACWAVMVSLAATWQAAGVRPDAVVGHSQGEIAAACVAGAISLRDGAKIVALRSQLI
ARLAGHGAMASIALPADQITLTDGVWIAARNGPAATVIAGAPEAVDSVLSAHGDARVRRIAVDYASHTPHVEQIRTE
LLPILADIDSQTPRIPWLSTVDDTWIEGPLGADYWYRNLREQVGFDTAVEHLQDSVFIEVSASPVLLPAMGDAITVA
TLRRDEGGQDRLVTALAEAYVQGVPVDWAAVIDNTTARVLDLPTYAFQHQRFWVANLTPEALLKAVRDSAATVLGHA
DPGTIPETAAFKDLGIDSLTAVELRNSLAKTTGLRLPATLVFDYPTPGVLAARL
SEQ ID NO: 110
EPLAIVGMACRLPGGVSSPEDLWRLVESGGDAISDFPVDRGWDVDNLFDPDPDAAGKTYSVQGGFLDTAAEFDAAFF
GISPREALAMDPQQRLVLEASWEVFERAGIEPGSVRGSDTGVFMGAYPGYYGIGADLDGFGATAGAGSVLSGRVSYF
FGLEGPAMTVDTACSSSLVALHQAGSALRQGECSLALVGGVTVMATPQTYVEFSRQRGLASDGRSKAFADAADGAGF
SEGVGVLLVERLSDARRHGHRVLAVVRSSAVNQDGASNGLTAPNGPSQQRVIRQALATAGLSPHEVDVVEAHGTGTT
LGDPIEAQAVLATYGQDRDRPLLLGSVKSNIGHTQAAAGVSGVIKMVMALQHGVVPPTLHVDEPSRHVDWSAGAVDL
VTENRPWPDLDRPRRAGVSSFGISGTNAHVILESVPAVPPVPSAGPAPLMISAKTAPALGEAEARLRDYLTADADLP
AIASTLASTRSTFEHRAVIFQNHTITGTAAADPRVVFVFSGQGSQRAGMGEQLAATFPVFKDIHRRVWDLLDVPDLD
VDQTGYAQPALFALQVALFGLLESWGVRPEAVIGHSVGELAAGYVAGLWSLEDACTLVSARARLMQALPPGGVMVAV
AVSEEHAQAALIKGVEIAAVNGPSSVVLSGDETAVLQVAAGLGKWTRLSTSHAFHSARMEPMLEKFRAVAEQLTYRT
PVITMAAEVTTPDYWVRQVRDTVRFGDQVAAFEGATFVEIGPDRTLARLVDGIAMLHGDDEVEAALTGLARLFVQGV
PVTWDNGGRVLDLPTYAFQRQRYWATSTRWLAGLTPQERENALLKVVRDNAAVVLGHAGAGAIPATAAFRDLGVDSL
TAVELRNSLATTTGLRLPATMVFDYPTPAAVAARL
SEQ ID NO: 111
EPLAIVGMACRLPGGVSSPEDLWRLVESGTDAISDFPTDRGWDVESLFDPDPDAAGKTYSVRGGFLDAAASFDAAFF
GISPREALAMDPQQRLVLEASWEAFERAGIEPSSVRGSDTGVFMGAFSAGYGTELEGFGVTAGAVSVLSGRVSYFFG
LEGPAMTVDTACSSSLVALHQAGYALRQGECSLALVGGVTVMASPQSFVEFSRQRGLSVDGRCKAFADAADGTGWAE
GVGVLVVERLSDAQAKGHRVLAVVRSSAVNQDGASNGLSAPNGPSQQRVIRQALANAGLTGADVDVVEAHGTGTTLG
DPIEAQAVLATYGQDREQPLLLGSLKSNIGHTQAAAGVSGVIKMVMALQHGVVPRTLHIDEPSQHVDWSAGAVELVT
QNQPWPGNDRPRRAGVSSFGVSGTNAHVILESAPTQPALPSVTATGPVPLVISAKTAPALTAFEARLRDYLTADADL
TAIAATLATTRATFDHRAVLLGDDTVTGVAVPEPRVVFVFPGQGWQWLGMGSALSESSVVFAERMAECATALDEFVD
WDLFSVLDDPAVVDRVDVVQPACWAVMVSLAATWQAAGVHPDAVIGHSQGEIAAACVAGAISLRDGARIVALRSQLI
ARLAGHGAMASIALPADQITLTDGVWIAARNGPAATVIAGDPAAVDSVLAAHQDARVRRITVDYASHTPHVEQIRAE
LLAILSDIGSQTPVIPWLSTVDGEWVEGPLGNDYWYRNLRETVGFDTAVGLLPDSVFIEVSASPVLLPAMGDAVTVA
TLRRDDGGLTRLLTALAEAWVQGVAVDWAIGATTARVLDLPTYAFQHQHYWAVTGTGLTPEALLKVVQDSTAQVLGY
TDAAAIAVTAAFKDLGIDSLTAVEMRNTLAKATGLRLPATLVFDYPTPSLLAGRL
SEQ ID NO: 112
EPLAIVGMACRLPGGVSSPEDLWRLVESGTDAISDFPTDRGWDVESLFDPDPDAAGKTYSVRGGFLDAAAGFDAAFF
GISPREALAMDPQQRLVLEASWEAFERAGIEPGSVRGSDTGVFMGAYPGGYGTGVDVGGFGATAGAVSVLSGRVSYF
FGLEGPAMTVDTACSSSLVALHQAGHALRQGECSLALVGGVTVMATPHTFIEFSRQQGLASDGRSKAFADAADGAGF
SEGVGVLVVERLSDAQAKGHRVLAVVRSSAVNQDGASNGLTAPNGPSQQRVIRQALADAGLVSADVDVVEAHGTGTT
LGDPIEAQAVLATYGQDREHPLLLGSLKSNVGHTQAAAGVSGVIKMVMALQHGVVPRTLHVDEPSRHVDWSAGAVNL
VTENLPWPSLDRPRRAGVSSFGISGTNAHVILESVPAQPPVSSTGPAPLVISAKTGPALTAFEARLRTYLAAASEVD
LGAVAATLATTRSVFEHRAVLLGEETIAGTAAVDPRVVFVFSGQGSQRAGMGEQLADAFPVFADIHRRVWDLLDVPD
LDVNQTGYAQPALFALQVALFGLLESWGVRPAAVIGHSIGELAAGYVSGLWSLEDACTLVSARARLMQALPPGGVMV
AVPVSEEQARGVLVEGVEIAAVNGPSSVVLSGDEAVVLQVASGLGKWTRLSTSHAFHSARMEPMLEEFQAVAEQLTY
RTPAIEMAAGEEVTTPDYWVRQVRDTVRFGEQVAAFSDAVFVEVGPDRTLARLIDGVAMLHGDDEPSAALTGLATLF
VQGVPVDWSAVVSGTEARVLDLPTYAFQHQRYWLDRKAARRAASAGGDLLKMVRGNAALILGHADPSAIAATTAFRE
LGVDSLTAVQLRNSLAKATGLRLPATLVFDYPTPAVLAGRL
SEQ ID NO: 113
EPLAIVGMACRLPGGVSSPEDLWRLVESGTDAISDFPPDRGWDVENLFDPDPDAPGKTYSIHGGFLDTAAEFDAAFF
GISPREALAMDPQQRLVLEASWEAFERAGIEPGSVQGSDTGVFMGAYSAGYGAGADLDGFGATAGAGSVLSGRISYF
FGLEGPAMTVDTACSSSLVALHQAGSALRQGECSLALVGGVTVMATPDLFVEFSRQRGLATDGRCKAFADTADGTGW
AEGVGVLLVERLSDAQAKGHRVLAVVRGSAVNQDGASNGLTAPNGPSQQRVIRQALANAGLAPHEVDVVEAHGTGTT
LGDPIEAQAVLATYGQDREQPLLLGSLKSNVGHTQAAAGVSGVIKMVMALQQGVVPQTLHVDEPSQHVDWSAGAVNL
VTQNQPWPDIDRPRRAAVSAFGVSGTNAHVILESVPASPPVPSTGPAPLVISAKTVPALTAFEARLRTYLAAVPEVD
LGAVAATLATTRATFEHRAVLLGEETIAGTAAVDPRVVFVFSGQGSQRAGMGEQLAAAFPVFADIHHRVWELLDIPD
LDVDQTGYAQPALFALQVALFGLLESWGVRPAAVIGHSVGELAAGYVSGLWSLEDACTLVSARARLMQALPPGGVMV
AVPVSEEQARAVLVEGVEIAAVNGPSSVVLSGDEAVVLQVASGLGKWTRLSTSHAFHSARVEPMLEEFRVIAGQLTY
RTPVIEMAAGEQVTSPDYWVRQVRDTVRFGEQVAAFSDAVFVEIGPDRTLARLIDGVALLHGDDETEAAMAGLARLF
VQGVPVDWSAVLGGTEARVLDLPTYAFQHQRYWAALTPEALLKVVRDSAAMVLGHADPSAISGTAAFRDLGLDSLTA
VELRNSLAKATGLRLPATLVFDYPTPSVLAGRL
SEQ ID NO: 114
EPLAIVGMACRLPGGVSSPEDLWRLVESGTDAISDFPPDRGWDTASLFDPDPDAAGKTYSVQGGFLDAVAEFDAGFF
GISPREALAMDPQQRLVLEASWEAFERAGIEPGSVRGTDTGVFMGAFSAGYGAHLEGFGATAGAVSVLSGRVSYLFG
LEGPAMTVDTACSSSLVALHQAAYSLRQGECSLALVGGVTVMATPQIFVDFSRQRGLAADGRCKAFADDADGTGWAE
GVGVLVVERLSDAQAKGHRVLAVVRSSAVNQDGASNGLTAPNGPSQQRVIRQALANAGLTSADVDVVEAHGTGTTLG
DPIEAQAVLATYGQDREQPLLLGSLKSNLGHTQAAAGVSGVIKMVMALQHGIVPRTLHVDQPSQHVDWSAGAVELVT
ENQPWPSLDRPRRAGVSSFGISGTNAHVILESVPASPPVPSTGPAPLVISAKTGPALTAFEARLRTYLAATPDADLP
TIASTLATTRSVFEHRAVLLGEETIAGTAAVDPRVVFVFSGQGSQRAGMGEQLADAFPVFADIHRRVWDLLDVPDLD
VNQTGYAQPALFALQVALFGLLESWGVRPAAVIGHSIGELAAGYVSGLWSLEDACTLVSARARLMQALPPGGVMVAV
PVSEEQARGVLVEGVEIAAVNGPSSVVLSGDEAVVLQVASGLGKWTRLSTSHAFHSARMEPMLEEFQAVAEQLTYRT
PAIEMAAGEEVTTPDYWVRQVRDTVRFGEQVAAFSDAVFVEVGPDRTLARLIDGVAMLHGDDEPSAAGTALARLHVQ
GVPVDWSAVLGGTGARVLDLPTYAFQRQRYWAGWLAGLAAEERDKALVTVVRDSVAAVLGYADSRKIALSASFKELG
VDSLTAVELRNNLAKTTGLRLPATLVFDHPTLAAMAARL
SEQ ID NO: 115
EPLAIVGVACRLPGGVSSPEALWRLVESGTDAISGFPADRGWDVDNLFDPDPEASGKTYCVQGGFLDTVADFDASFF
GISPREALAMDPQQRLILEVCWEAFERAGIEPGSVRGSDTGVFMGAFGSGYGSDLEGFSATAGAGSVLSGRISYFFG
LEGPAMTVDTACSSSLVALHQAGYALRQGECSLALVGGATVMATPQTFIEFSRQRGLAADGRCKSFGDNADGTGWSE
GVGALLVERLSDAQAKGHRVLAVVRGSAVNQDGASNGLTAPNGPSQQRVIRQALANAGLAPHEVDVVEAHGTGTRLG
DPIEAQAVLATYGQDRERPLLLGSLKSNVGHTQAAAGVSGVIKMVMALQHSVVPQTLHVDAPSRQVDWSAGAVELVT
QNQPWPETGRARRAAVSAFGVSGTNAHVILESAPAQPPAPSTPVTGPVPLVISAKTASALGQAEARLRTYLADKPDA
DLAAIAATLATTRSTFEHRAVLLGDETIRGVAVPDPRVVFVFPGQGWQWLGMGSALRESSVVFAERMAECAAALSDY
VDWDLFSVLDDLAVVDRVDVVQPACWAVMVSLAATWQAAGVRPDAVIGHSQGEIAAACVAGAISLRDAAQIVALRSQ
LIAGLAGQGAMASIALPADQITLTDGVWIAARNGLAATVIAGDPAAVDGVLAAHQDARVRRITVDYASHTPHVEQIR
TELLDLTTDISSRTPAIPWLSTVDSTWIEGPLDTDYWYRNLREPVGFDTAVNLLPDSVFIEVSASPVLLPAMGDAAT
VATLRRDDGSQTRLLTALAEAYVQGVAIDWTIGATTARVLDLPTYAFQHQRFWVANALTPEALLKVVRDSAATVLGH
ADPGTIPETAAFKDLGVDSLTAVELRNSLAKATGLRLPATLVFDYPTPSVLAGRL
SEQ ID NO: 116
EPLAIVGMACRLPGGVSSPEDLWRLVESGTDAISDFPADRGWDIENLFDPDPDAPGKTYSVQGGFLDTAAEFDAGFF
GISPREALAMDPQQRLVLEASWEVFERAGIEPGSVRGSDTGVFMGAYPGYYGIGADLDGFGATAGAGSVLSGRVSYF
FGLEGPAMTIDTACSSSLVALHQAGSALRQGECSLALVGGVTVMATPQTYVEFSRQRGLASDGRSKAFADAADGAGF
SEGVGVLLVERLSDARRHGHRVLAVVRSSAVNQDGASNGLTAPNGPSQQRVIGSALANAGLAPHDVDVVEAHGTGTA
LGDPIEAQAVLATYGQDREQPLLLGSVKSNLGHTQAAAGVSGVIKMVMALQHGIVPRTLHVDEPSRHVDWSAGAVEL
VTENQPWPEHDRPRRAGVSSFGISGTNAHVILESVPAQPPVSSTGPAPLVISAKTASALGQAEARLRTYLTVDADLP
AIAATLATTRAVFEHRAVLLGDTTITGVAADPRVVFVFSGQGSQRAGMGEQLAAAFPVFADTHRRVWDLLDVPDLDV
DQTGYAQPALFALQVALFGLLESWGVRPEAVIGHSVGELAAGYVSGLWSLEDACALVSARARLMQALPPGGVMVAVA
VSEEQARTALVEGVEIAAVNGPGSVVLSGDEAVVLQVASGLGKWTRLATSHAFHSARMEPMLEEFRAVAEQLTYRTP
AIEMAAGEQVTTPDYWVRQVRDTVRFGEQVAAFGDAVFVEIGPDRTLARLIDGVAMLHGDDETEAAMAGLAKLFVEG
IPVDWSAVLGGNAARVDLPTYAFQRQRYWAASLLAGLTPEERGNALLKVVRDNAAVILGHAGAAAIPATAAFRDLGV
DSLTAVELRNSLATSTGLRLPATMVFDYPTPAAMAARLD
SEQ ID NO: 117
EPLAIVGMACRLPGGVFSPEDLWHLVESGTDAISGFPADRGWDVEKLFDPDPDAPGKTYCVQGGFLEATAAFDAAFF
GISPREALAMDPQQRLMLEVSWEAFERAGIEPGSVRGSDTGVFLGAYPGGYGAGAGTDLGGFGATGGAGSVLSGRVS
YFFGLEGPAMTVDTACSSSLVALHQAAYSLRQRECSLALVGGVTVMGTPHMFVDFSRQRGLSVDGRCKAFADAADGT
SWSEGVGVLLVERLSDAQAKGHRVLAVVRGSAVNQDGASNGLTAPNGPSQQRVIRQALANAGLAPHEVDVVEAHGTG
TTLGDPIEAQAVLATYGQDREQPLLLGSLKSNVGHTQAAAGVSGVIKMVMALQRGVVPQTLHVDQPSRHVDWSAGAV
DLTTENRPWPDTDRPRRAGVSSFGVSGTNAHVILESAPAQPPTPSTPVTGPVPLVISAKTASALGQAEARLRDYLTA
DADLTAIAATLAITRSTFEHRAVLLGDDTITGVATPDPRVVFVFPGQGWQWLGMGSALRESSVVFAERMAECAAALD
EFVDWDLFSVLDDPAVVDRVDVVQPACWAVMVSLAATWQAAGVRPDAVIGHSQGEIAAACVAGAISLRDGAKIVALR
SQLIAGLAGQGAMASIALPADQITLTDGVWIAARNGPAATVIAGTPSAVDSVLAAHQDARVRRITVDYASHTPHVEQ
IRTELLGILADIDSQTPLIPWLSTMEGTWVEGPLHSDYWYRNLREPVGFDTAVSLLPDSVFIEVSASPVLLPAMGDA
LTVATLRRDEGGQNRMFTALAEAYVQGVAVDWAAVIGATTARVLDLPTYAFQHEDYWLDSTRLMGLAAEERDKALVT
VVRESAAVVLGHADARAIPVTAAFRELGVDSLTAVQLRNSLAKATGLRLPTTLAFDYPTPAVLAARL
SEQ ID NO: 118
EPLAIVGMACRLPGGVLSPEDLWRLVESGTDAISGLPTDRGWDIDNLYDPEPGAPGKSYCVQGGFLDTVADFDPAFF
GISPREALAMDPQQRLVLEVSWEAFERAGIEPGSVRGSDTGVFMGAFGNGYGIDTDGGGFGATAGTGSVLSGRVSYF
LGLEGPAMTVDTGCSSALVALHQARYALRQGDCSLALVGGVTVMASPYTFVEFSRQRGMAANGRCKAFADAADGTGW
AEGVGVLLVERLSDAEAKGHRVLAVVRGSALNQDGASNGLTAPNGPSQQRVIQAALANAGLVSADVDVVEAHGTGTT
LGDPIEAQAVLATYGQDREHPLLLGSLKSNIGHTQAAAGVSGLIKMVMALQHGVVPQTLHVDEPSRHVDWSAGAVEL
VTENRPWPSVDRPRRAGVSAFGISGTNAHVILESAPPSPAPSTPVTGLVPLVISAKTAPALGQAEARLRDYLTADVD
LTAIAATLVTTRSTFEHRAVLLGDDTVTGVAVPDPRVVFVFPGQGWQWLGMGSALRESSVVFAERMAECASALSDYV
DWDLFTVLDDPAVVDRVDVVQPACWAVMVSLAATWQAAGVRPDAVIGHSQGEIAAACVAGAISLRDAAQIVALRSQL
IAGLAGHGAMASIALPADQITLTDGVWIAARNGPTATVIAGNPQAVDSVLAAHQDARVRRITVDYASHTPHVEQIRT
ELLDLTTDVGSRTPAIPWLSTVDGEWVEGPLDTDYWYRNLREPVGFDTAVGMLPDSVFIEVSASPVLLPAMGDAATV
ATLRRDDGGQTRLLTALAEAYVQGVAVDWAVGATTARVLDLPTYAFQHQRYWVADRLHDRPGVEQHRLMRELVLRHA
ATVLGHDSPDAIAADHPFKDLGLDSLTAVELRNHLVAETGLRLSATTAFDHPTADDLARHL
SEQ ID NO: 119
EPIAIVSMACRAPGGVSSPEGLWRLVESGTDATSGFPTDRGWDVENLFDPDPDAAGKTYSMRGGFLETAADFDAPFF
GISPREALGMDPQQRLLLETAWEAIERAQIDPKSLRGQDVGVYVGGAAQGYGIGATDQQQENLITGSSISLLSGRVS
YALGLEGPGVTVDTACSSSLVALHLAGQALRQRECSLALVSGVSVMATPDVFVEFSRQRGLAADGRCKSFAASADGT
TWSEGVGVLVLQRLSEAVRQGHRVLAVVRGSAVNSDGASNGLTAPNGVSQRRVIRQALASAGLAASEVDVVEAHGTG
TKLGDPIEAEAILATYGQDRAAPAWLGSLKSNIGHTMAASGVLGVIKMVEAMRHGLLPRTLHVDEPSSHVDWERGDV
ALLTENQPWPDSTRPRRAGVSSFGLSGTNAHVVLEEYPAPAAADPPVTPAGGGPLPWVLSAQSPNALREQAARLYAA
LAEDPDWRPLDIGYSLATTRAGFPHRAVAVGSDREEFQRALSKLADGTGWPGLITATAAKDRRMAFLFDGQGTQRLG
MGKGLHRRFPVFARAWDAVSAAFAKHLDHSLTDIYLGPSSPASAELADDTLYAQAGIFTMEVALVELLEDWGVRPDF
VAGHSIGEAAAAYTAGMFSLEDVTALIVARGRALRLTPPGEMVALRGGEADVRELLQRTGAALDLAAVNSPEAVVVS
GAPDAVAEFRAAWTASGRRARDLTVRHAFHSRHVESVLDEFRATLAALTFRAPALPVVSTMTGRLADPAEMGTPEYW
LRQVRQTVRFEEAVRELSGQGVGTFVEIGPSGALATAGLECLGGDATFHAVQRPRAPEDVCLMTAVAELHAGGTAVD
WTKILAGGRPVDLPVYPFQHRPYWIAPAPSYPDEPRTMRELVRLEVAGILGLSDPSVILDDSSFLELGFDSLSSMRL
GNRLATVTGLDLPSTLLFEYATPAALATHLD
SEQ ID NO: 120
EPLAIVGMACRLPGGVESPDDLWRLVASGTDAISGFPRDRGWDVDNLYDPDPDAPGKTYTVLGGFLDSVAGFDASFF
GISPREALAMDPQQRLVLEVAWEAFEHAGIAPRSVRGTDTGVFMGAFSSGYDAELEEFGMTGDAVSVLSGRVSYFFG
LEGPAMTVDTACSSSLVALHQASSALRQGECSLALVGGVTVLATPKTFVEFSRQRGLAGDGRSKAFADAADGAGWSE
GVGVLLVERLSDARAKGHHVLGVVRGSAVNQDGASNGLSAPNGPSQQRVIRQALAGAGLSPHEVDVVEAHGTGTKLG
DPIEAQAVIATYGQDRDQPALLGSLKSNVGHTQAAAGVAGVIKMVMALQHATVPATLHVDAPTRHVDWTAGAVELVT
ENRPWPETGRARRAAVSSFGISGTNAHVILESAPAAAPEETEPVAPVVASDRVPLVISAKTPAALTSTEDRLRAYLA
AHPGTDPRAVASTLATTRSVFEHRAVLLGENTVTGSVAGADPRVVFVFPGQGWQRLGMGRELLAASPVFAGRMAECA
TVLREFVDWDLFTMLDDPAVVDRIEVVQPVCWAIMVSLAAVWQAAGVRPDAVIGHSQGEIAAACVSGAVSLRDAARI
VTFRSDMIARMTGHGVMASVALHADDIPLVEGAWVAARNGPAATVVAGTPEAVDQVLAACEERGARVRRITAGVASH
TPLAEHVRGELLDATGGLPSRVPDIPWLSTVDGTWVEKPLDPAYWFRNMREPVGFAPAVDLLRAQGDHVFLEISASP
VLLPSMDDAVTVATLRRDDGSADRMLAALAEAHTHGVVVDWPRVLGTAGRVRGLPTYAFQHQRYWAVSRPAVLTPDA
LLKVVRDSAATVLGYTDADSITVTTAFRDLGVDSLSAVELRNNLAKSTGLRLPATLVFDYPTPADLATHL
SEQ ID NO: 121
EPLAIIGMACRLPGGITSPEDLWRLVASGSDAISDFPDDRGWDVGNLYDPDPDAPGRSTTVRGGFLDEVAGFDASFF
GISPREALAMDPQQRLVLEVSWEAFERAGIEPGTVRGSDTGVFMGAYPGGYGVGADLGGFGTTAVSGSVLSGRVSYF
FGLEGPAMTVDTACSSSLVALHQAGHALRQGECSLALVGGVTVMPTPNIFVEFSRQRGLAADGRCKPFADAADGTGF
SEGAGVLLVERLSDAQTNGHHILAVVRASAVNQDGASNGLTAPNGPSQQRVIRSALANAGLTTADVDVVEAHGTGTT
LGDPIEAQAVIATYGQDRAQPVLLGSLKSNIGHTQAAAGVSGVIKMVMALRNGTVPRTLHVDEPSRHIDWTAGAVEL
ATENRPWPETERPRRAGVSSFGISGTNAHVILESTPTQPVEPSTPAAHPLPLPISAKTPPALAALEARLRAYLTSET
DLAAVASTLASTRAVFEHRAVLLGDETIVGVAALDPRVVFVFSGQGSQRAGMGEQLAAVFPVFAQIHREVLDLLDIP
DLDIDQTGHAQPALFAFQVALAGLLDSWGVRPDAVIGHSIGELAAAYIAGLWSLEDACTLVSARARLMQALPSGGAM
VAVQATEEQARAVLIDGVEIAAVNGPSSVVLSGDETAVLQVAAELGGKSARLKTSHAFHSARMEPMLDQFRQVAEQL
TYRSPVIEMAAGTTSDYWVRQVRDTVRFGDQVRVHQGSVLVEIGPDRTLARLIDGIATSHGDDEVRAVMTALAELHV
RGVAVDWPGTTSARVLDLPTYAFQHERYWLANTAAELTAADLLKAVRDSAAVVLGHADADSIPATTAFKDLGFDSLT
AIELRNRLAKDIGLRLPATMAFDYPTPAALAARL
SEQ ID NO: 122
EPLAIVGMACRLPGGVTSPEDLWRLVASGTDAITEFPTDRGWDVGNLYDPDPDAPGKSTTVHGGFLEGVAGFDASFF
GISPREALAMDPQQRLVLEVSWEAFERAGIEPGAVRGSDTGVFMGAYPGGYGVGADLGGFGTTAGAGSVLSGRVSYF
FGLEGPAMTVDTACSSSLVALHQAGHALRQGECSLALVGGVTVMPTPNIFVEFSRQRGLSADGRCKPFADAADGTGW
SEGVGVLVVERLSDARANGHRILAVVRGSAVNQDGASNGLTAPNGPSQQRVIRQALANAGLTTADVDVIEAHGTGTT
LGDPIEAQAVIATYGQDRTQPVLLGSLKSNIGHTQAAAGVSGVIKMVMALQHDTVPASLHVDEPSRHVDWTAGAVEL
ATESRPWPKTGRAHRAGVSSFGVSGTNAHVILESAPTQPEEPSTPAPHPLPLPVSAKTSAALTDLEDRIRAYLTPET
DLAAVASTLASTRAMFEHRAVLLGDETITGVAAPDPRLVFVFSGQGSQRAGMGEQLAAVFPVFAQIHREVLDLLDVP
DLDIDQTGHAQPALFAFQVALAGLLDSWGVRPDAVIGHSIGELAAAYVAGLWSLQDACALVSARARLMQALPPGGAM
VAVAVPEEQARAVLIDGVEIAAVNGPSSVVLSGDETAVLQVAAELGGKSTRLRTSHAFHSARMEPMLDQFRQVAEQL
TYRSPVIEMAAGTTPDYWVRQVRDTVRFGDQVRVHQGSVLVEIGPDRTLARLIDGIATSHGDDEVRAAMTALAELHV
RGVAVDWPGTTSARVLDLPTYAFQHRRYWVAPARRAAGRPADLTPEGLLTTVRDSAAVVLGHADASAIPATAAFQAL
GVDSLIAVELRNNLAKNTGLRLPATLIFDYPTPVDLATHL
SEQ ID NO: 123
EPLAIIGMSCRLPGGVTSPEDLWRLVASGTDAITGFPADRGWDLENLYDPDPDAPGRTTTVQGGFLDDVAGFDASFF
GISPREAVAMDPQQRLALEASWEAFERAGIEPGSVRGSDTGVFMGAYPGGYGIGADLGAFMLTGRAGSVLSGRLSYF
FGLEGPAMTVDTACSSSLVALHQASYALRQGECSMALVGGVTVMPTPVMFVEFSRQRNLADDGRCKAFADGADGTGW
SEGVGVLLVERLSDALAKGHRIMAVVRGSAVNQDGASNGLTAPNGPSQQRVIQSALDSAGLTTADVDVIEAHGTGTT
LGDPIEAQAVIATYGQDRAQPVLLGSLKSNIGHTQAAAGVSGVIKMVMALQNGVVPRTLHVDEPSRHVDWTAGAVEL
ATENRPWPEVGRARRAAVSSFGFSGTNAHVILESAPAQPATPSAPVAHLLPLPISAKTPPALADLEARLRAYLTPEA
DLPAVASTLASTRAVFEHRAVLLGDETIVGIAALDPRVVFVFSGQGAQRAGMGEQLAAVFPVFAQIHREVLDLLDIP
DLDIDQTGHAQPALFAFQVALAGLLESWGVRPDAVIGHSIGELAAAYIAGLWSLEDACALVSARARLMQALPSGGAM
VAVQATEDQARAVLIDGVEIAAVNGPSSVVLSGDETAVLQVAAGLGGKSTRLRTSHAFHSARMEPMLDQFRQVAEQL
TYRSPVIEMAAGVTPDYWVRQVRDTVRFGDQVRVHQGSVLVEIGPDRTLARLIDGIATSHGDDEVQAAMTALAELHV
RGVAVDWPGTTSARVLDLPTYAFQHQRYWTVSWLAGLTPEEREGALVKVVRDSAAVVLGHADAGTIPVTAAFKDLGL
DSLTAVELRNSLARSTGLRLPATMVFDYPTLGALAARLD
SEQ ID NO: 124
EPLAIVGMACRLPGGVTSPEDLWRLVESGTDAVSAFPADRGWDADALYDPDPEAAGKTYCVRGGFLDGVAGFDASFF
GISPREALAMDPQQRLILEASWEAFERAGIEPGSVRGSDTGVFMGAFPGSYGVDADLGGFGMTGGAASVLSGRVSYF
FGLEGPAMTVDTVCSSSLVALHQAGHALRQGECSLALVGGVTVMSTPDTFVEFSRQRGLAADGRCKAFGDGADGTGW
AEGAGVLLVERLSDAQAKGHRILAVVRGSAVNQDGASNGLTAPNGPSQQRVIRSALANAGLSSADVDVVEAHGTGTK
LGDPIEAQAVLDTYGQDRERPLLLGSLKSNVGHTQAAAGVSGVIKMVMALQHGVVPRTLHADVPSRQVDWTAGAVEL
VTENRSWPEADRPRRAAVSSFGLSGTNAHVILESPPDQPTTASAPTTGPVPLPISAKTPAALADLETRLRAYLTPET
DLPAVAATLAVNRSLFEHRAVLIGDDTITGTASTEPRVVFVFPGQGWHWLGMGSALLASSAVFADRMAECNAALSEF
VDWDLFTALDDPAVFDRVDVVQPTCWAVMVSLAAVWQHAGVRPDAVLGHSQGEIAAACFAGAISLQDAARIVALRSR
LIGRLAGRGAMASVSLPPDEIPLIDGVTVAVLNGPSAVIAGAPDAVDAVLADCEARGARVRKINVDYASHTPHVEQI
RTELLDITAGITAETPTVPWLSTVDGTWIDRPLDTEYWYRNLREPVGFGATIELLQAQGDTIFIEVSASPVLLQAID
DSIAIPTLRRDDGTPTRLLTALAEAHVHGVTIDWAKLLGSTASPVNLPTYAFQRQRYWAASAAAGRPAELTPEHLLK
VVRDSAAVVLGHTDAGAIPATAAFQALGVDSLIAVELRNNLAKSTGLRLPATLIFDYPTPADLATHL
SEQ ID NO: 125
EPLAIIGMACRLPGGITSPEDLWRLVESGSDAISDFPDDRGWDVDRLFDPDPDAAGKTYTTQGGFLSEVAGFDASFF
GISPREAVAMDPQQRLVLEVAWEAFERAGIEPGTVRGSDTGVFMGAYPDGYGSGTDLAGFGVTAGAGSVLSGRVSYF
FGLEGPAMTVDTACSSSLVALHQAGSALRQGECSLALVGGVTVMPTPRTFVEFSRQRGLAADGRCKPFADAADGTGF
SEGAGMLVVERLSDAQTNGHHILAVVRASAVNQDGASNGLTAPNGPSQQRVIQSALAGAGLVSADIDVIEAHGTGTT
LGDPIEAQAVIATYGQDRSQPVLLGSLKSNIGHTQAAAGVSGVIKMVMALQHDTVPATLHVDEPSRHVDWTAGAVAL
VTENQPWPRNGHARRAGVSSFGVSGTNAHVIIEEAPAEPPVEPVPAADVVVPLVVSARDAIPLGDQAARLAALVEAP
DGPVLPALADALLTRRTTFAQRAVVVAGSRDDAAAGLRALATGTAHPALVTGAAGTSGRVVLMFPGQGSQWDGMGAQ
LIGASPVFAARIADCAAALQPWIDWDLQDVLRGNAPTDLLERVDVVQPASFAVMVGLAAVWESVGVRPDAVLGHSQG
EIAAAYVAGALTLADAAKVVAVRSRLIAARLGRGGMASVALSPQDAAARRGRAELAAVNSPASVVLAGASEALDETL
AALEADGVRVRRVAVDYASHTGHVEELEQDLAEALADVRSQAPLVGFRSTVTGEWVTEAGALDGGYWYRNLRQQVRF
GPAVAALAEDGYSVFVEASAHPVLVQPVTETLDRTDAVVTGSLRRQDGGLSRLLTSVAEVFVGGVPVDWAGLLPAGA
GRSWVDLPTYAFDHQHYWLPAGGTRGRSEAELLELVRGRAAAVLGHTDAGSIPATAAFKDLGLDSLTAVELRNSLAK
STGLRLPATMVFDYPTPAAVAARL
SEQ ID NO: 126
EPLAIVGMACRLPGGITSPEDLWRLVASGSDAISDLPVDRGWTVDGHFQGGFLDEVAGFDASFFGISPREAVAMDPQ
QRLVLEVAWEAFERAGIEPGSVRGTDAGVFMGAYADGYGMGTDLGGFGMTSVAVSVLAGRISYFFGLEGPAMTVDTA
CSSSLVALHQAGHALRQGECSLALVGGVTVMPTPQTFVEFDRQRGLAADGRCKAFADAADGTSFSEGAGMLVVERLS
DALANGHHILAVVRGSAVNQDGASNGLTAPNGPSQQRVIRSALANAGLTTADVDVVEAHGTGTTLGDPIEAQAVIAT
YGQNRQRPLLLGSLKSNIGHTQAAAGVSGVIKMVMALRNGTVPATLHVDEPSRHIDWTAGAVALVTENQPWPETERP
RRAGVSSFGISGTNAHVILESTPTPPATLSAQVAHPLPLPISAKTPPALADLEARLRAYLTPEADLAAVASTLASTR
AVFEHRAVLLGDETIVGVAALDPRVVFVFSGQGSQRAGMGEQLAAVFPVFAQIHREVLDLLDIPDLDIDQTGHAQPA
LFAFQVALAGLLDSWGVRPDAVIGHSIGELAAAYVAGLWSLQDACALVSARARLMQALPSGGAMVAVAVPEDEARAV
LIDGVEIAAVNGPSSVVLSGDETAVLQVAESLGGKSARLKTSHAFHSARMEPMLDQFRQVAEQLTYRSPVIEMTAGV
TPDYWVRQVRDTVRFGDQVRVHQGSVLVEIGPDRTLARLIDGIATSHGDDEVQAVMTALAELHVRGVAVDWPGTTSA
RVLDLPTYAFQHDHYWAHPVDRTPEALLALVRDSAAVALGHAGAATVPATAAFQSLGMDSLIAVELRNNLARSTGLR
LPATLVFDYPTPAALATRL
SEQ ID NO: 127
EPLAIVGMACRLPGGVTSPEDLWRLVASGTDAITGLPTDRGWEEDDRFRGGFLAGVAGFDASFFGISPREAVAMDPQ
QRLVLEASWEAFERAGIEPGSVRGSDTGVFMGAYPGGYGFGADLGGFALTSGSGSVLSGRVSYFFGLEGPAMTVDTA
CSSSLVALHQAGYALRQGECSLALVGGVTIMPTPQTFIEFERQRGLAADGRSKAFADSADGTGWSEGVGVLVVERLS
DAQANGHHILAVVRGSAINQDGASNGLTAPNGPSQQRVIRSALANAGLTTADIDVIEAHGTGTTLGDPIEAQAVIAT
YGQDRSQPVLLGSLKSNIGHTQAAAGVSGVIKMVMALQHDTVPATLHVDRPSRHVDWAAGAVELVTENRPWPENGRV
RRAGVSAFGVSGTNAHVILESPPDQPVKPSAPAAGPVPLPISAKTPAALAALENRLRAYLTPETDLPAVASTLATTR
AMFEHRAVLLGDDTITGTASTEPRVVFVFPGQGWHWLGMGSALLASSAVFADRMAECNAALHEFVDWDLFTALDDPA
VFDRVDIVQPTCWAVMMSLAALWQHAGVRPDAVLGHSQGEIAAACFAGAISLQDAARIVALRSQLIGRLAGRGAMAS
VSLPPDEIPLIDGVTVAVLNGPSAVIAGSPEAVDAVLADCEARGARVRKINVDYASHTPHVEQIRTELLHITAAITA
ETPTVPWLSTVDGTWIDHPLDTEYWYRNLREPVGFGATIELLQTQGDTIFIEVSASPVLLQAIDDSIAIPTLRRDDG
TPTRLLTALAEAHVNGVTIDWATVLGATGSPVDLPTYAFQHQRFWVGDRLHGRTSAEQHRIMLDLVLGHATSVLGHQ
TPDAVASDRAFKDLGMDSLTAVELRNHLVAETGLRLPATTAFDHPTADDLARRL
SEQ ID NO: 128
EPIAIVSMACRAPGCVTSPEGLWRLVESGTDAIADFPADRGWDLATLYSPDPIGYTSYCLQGGFLDAAADFDAAFFG
ISPREALGMDPQQRLLLETSWEAIERARIDPRSLRGRDVGVYVGGATQGYGVGAVDQQRDNVITGSSISLLSGRLSY
ALGLEGPGVTVDTACSSSLVALHLASQALRQRECSMALVSGVSVIPTPDVFVEFSRQRGLASDGRCKSFSAAADGTI
WAEGVGVLVLERLSEATRLGHEVLAVIRGSAVNSDGASNGLTAPNGASQQRVIRQALASAGLNAADVDTVEAHGTGT
KLGDPIEAEAILATYGQDRSSPVWLGSLKSNIGHSMAASGVLGVIKMVEAMRHARLPRTLHVDEPSPHVDWASGDVA
LLTENQPWPDGARPRRAGVSSFGLSGTNAHVVLEQHRAPAVPVAAETVADDVPLPLLLSARHPKALRDQAARLHAAL
AEAPGWRPLDVGYSLATTRSAFAHRAVAVGSGRELLRALAKLAEGAAWPALVTGTAKAGRVAFLFDGQGTQRLGMGR
VLHDRFPVFARAWDTVSARFDQHLDHSLTDVYLGRDTSAAALADDTLYAQAGIFTMEVALFELLAEWGVRPDLVSGH
SIGEVAAAYAAGLFSLEDAATLIVARGRALRQMPPGAMLALRASEDQVRELLDRTGADLDVAAVNSPVSVVVSGDPD
AVAAFRAEWEASERDARALNVHHAFHSRRVDAVLDEFRAVLGTLTFRTPALPVVSTVTGRLAGPAEMSTPEYWLRQI
RRTVRFQDAVRELSGQGAGTFVEIGPSGALAAAGLECVDASFHAVQRPRSPEDACLLTAVAELHAGGTAVDWAKVLA
GGRATDLPVYPFQHETYWIPPASPPADTRTMLEVVHEEAALVLGVTDPRVILDDSSFLDLGFDSLSAMRLGNQLSAV
TGLDLPPSLLFEHPTVGELAAHLD
SEQ ID NO: 129
EPLAIVGMAARFPGGVASADDLWRLVVSGGDAIGGFPADRGWDLEELYDPDPAATGRSYVREGGFLNDATTFDASFF
RIGPREAKAMDPQQRLLLETSWEAFEHAGIRPETLRGTATGVFAGISLQDYGVLAGSDPELEGYAGTGNAPSVLSGR
LSYFYGLEGPAVTIDTACSSSLVALHLAGQSLRRDECTLAVVGGVTVMPSPNVFVEFSRQRGLAPDGRCKPFAAAAD
GTGWSEGVGVLVVERLSDARRNKRRILAVVRGSAVNQDGASSGLTAPNGPSQQRVIRSALAAAGLTAGDVDVVEAHG
TGTTLGDPIEAQGVLATYGDRSGAPVRLGSVKSNLGHTQAAAGIAGVIKMVQALRHGVMPRSLHIDEPSPHVDWTAG
RVELLTSNLPWPTSERPRRAAVSSFGISGTNAHVILEQAFPATEPEPSFTPVVSGPALPLVFSARDSGALATRTHLS
DGPGVAYALATSRSMFDHRSVRIGDMTVTGVATTDPEVVFVFPGQGTQWAGMGRALMDASPVFAERMNECAAALEPY
LDLWEAIDTPDQVETLQPASWAVMVSLAAVWQAAGVRPAAVIGHSQGEIAAACVAGSLSLADAAAVVALRSKAIAAS
LGKGAMASIPLPVEEIELIDEVWVAALNGPSSTVVAGAPDAVEQVRARYDGRRIAVDYASHTPHVEALRGQVVSVPS
QAPDIPWFSTVDSEWVEGPLDDDYWFRNLRQPVQFGPAAARFDDAVFVEVSARPVLIPALDASVTVPSLRRDDGGPE
RMLASLAQAFVAGVAVDWTTIVPPAPFVDLPTYPFQGERFWIDLDDVLAVVRDCAATVLGHTDPAAIAPDRPFKDLG
FDSLAAVQLRNHLLTVTGVRLSATAVFDFPTPAVLAGEV
SEQ ID NO: 130
EPIAVVGMACRLPGDVASPEDLWRLVAEGRDAVGPFPADRGWELGEAAYARVGGFVTGATGFDAGFFGISPREALAM
DPQQRLLLEVAWEAFERAGIAPDALRGSDTGVFVGTYGQGYGELAVDGDAEGYVGIGNSGSVVSGRVSYFFGLEGPA
VTVDTACSSSLVALHQAAQALRQGECSLALVGGVTVMSSPLIFQEFARQGGLAADGRCKAFADGADGTGWGEGVGVL
VVERLSEAQRRGHTVLAVVRGSAVNQDGASNGLTAPNGPSQQRVIRSALASAGLGFGDVDLVEAHGTGTALGDPIEA
QALLATYGSAGTPVWLGSLKSNIGHTQAAAGVAGVIKAVEAMRHGVLPQTLHADQPSSHVDWTAGAVELLTANRPWD
SAGRPRRAAVSSFGISGTNAHVILEEFSSAPVSPEPGAGAAPLLLSARSAAALAEFESRVAALRPSRDLAATLAGRV
FFDHRAVVLPGGEVVRGRVGDAPVVFVFAGQGSQRSDMASRLAGEFPLFAAAHERVWSLLDVDESLDVDQTGFAQPA
LFAYEVALAELLGVRPDAVIGHSVGELAAAYVAGALSLEDACRLVSARARLMQALPPGGVMVSVRVSEEAARAVLRD
GVELAAVNGPRAVVLSGDEGAVLAAAAELGEFRRLRTSHAFHSALMEPMLEEFRAVASSVEFGEPEIALSFVPSADY
FVRQVRETVRFGEQVAAFEPGTLFVEVGPDGSLSRLTGGVNAAEPLTALAHLWAHGAVVDWTPYTSDGRLDTAPTYP
FQPERYWPEQRRRRARRGDSLALVIATAAAVLGHPEGTDIPADTPFQSLGFDSLSAVDLRNQLAHATGVRLSPTAVF
DHPTPRALAERL
SEQ ID NO: 131
DPIAIVGMACRYPGGVATADDLWDLVAEGGDAVGPFPADRGWDLAGLYDPDPEAAGKSYVREGGFLGGAADFDAAFF
GISPREALAMDPQQRLLLETAWEAFEHAGIDPLDLRRSDTGVFVGTMAQEYGGLVTDSAHGLEGWIGTGNSQSVMSG
RLSYFFGLQGPAVTIDTACSSSLVALHQAAQALRSGECSLAVVGGVTVMSSPRTFQEFSRQRGMAPDGRCKPFAAAA
DGTGWSEGVGVLVVERLSEARRNGHAVLAVVRGTAVNQDGTSNGLTAPNGPAQQQVIRAALERAGLGVGDVDVVEAH
GTGTALGDPIEAQAILDTYGSRTTGEPVRLGSVKSNLGHTQAAAGVAGVIKMVQAMRHATMPRSLHIDEPSPHVDWA
SGAVELLTAERGWPATDRPRRAAVSSFGISGTNAHVIVEGVTEPEPSREAAPSGPLPLMLSAPTAEALAEQETRLRR
FRADRPDADERDIAVTLAGRTGFAHRTVLIGELSVSGVAVADRRVVFVFPGQGTQWAGMGRDLMDASPVFAERMNEC
AAALEPYLDLWEAIDTPDRVETLQPASWAVMVSLAAVWQAAGVRPAAVIGHSQGEIAAACVAGSLSLADAAAVVALR
SKAIAASLGKGAMASIPLPAEEIELIDEVWVAALNGPSSTVVAGAPDAVEQVRARYDGRRIAVDYASHTPHVEALRG
QVVSVPSQAPDIPWFSTVDSGWVEGPLDDDYWFRNLRQPVQFGPAAARFDDAVFIEVSARPVLIPVLEDAVTVPTLR
RDDGGIGRLHASVAQAWTAGADVDWAALLPAGGRRIALPPYAFTHERFWPRRPAAAGQDLLTVVRTAAATVLGHRDA
ARVPADRAFKELGFDSLSAVQLRNELLTATGVRLSATAVFDHPTAAALAEAL
SEQ ID NO: 132
EPIAIVGMACRLPGDVSSPDELWELVESGRDAIGPFPADRGWNLSTLFDPDPDAPGKSYVREGGFLTGAGLFDADFF
GISPREALAMDPQQRLLLEVAWEAFERAGIAPDALRGSDTGVYVGTYAQGYGELAAATAGEGFVGIGNSGSVVSGRV
SYFLGLEGPAVTVDTACSSSLVALHQAAQALRLGECSLALVGGVTVMASPLMFQEFSRQRGLSPDGRCKAFAEGADG
TGWGEGAGVLVVERLSEARRRGHTVLAVVRGSAVNQDGASNGLTAPNGPSQQRVIRAALAAAGLTFGDVDVVEGHGT
GTALGDPIEAQALLATYGAAGSPVRLGSLKSNIGHTQAAAGVAGVIKMVQAMRHGVMPRTLHVDQPSSHVDWSAGAV
ELLTANRTWEAPGRPRRAAVSSFGISGTNAHVILEGVPAPEPAAGSAETAPLLLSARTVPALNDFEARVSARPSSPD
LAATLSRRVFFDHRAVVLPGGEVVRGRVGDAPVVFVFAGQGSQRADMASRLAGEFPVFAAAHERVWSLLDVDEGLAV
DQTGLAQPALFAYEVALAELLGVRPDAVIGHSVGELAAAYVAGALSLEDACRLVSARARLMQALPPGGVMVSVRVSE
EAARAVLRDGVEIAAVNGPRAVVLSGDEDAVLAAAAELGEFRRLRTSHAFHSARMEPMLEEFRAVASSVVFGEPEIA
MSFVPSADYFVRQVRETVRFGEQVASFDPGSLFVEVGPDGSLSRLTGGVSAAEPMKALAYLWVRGVGVDWAPYVGGG
RLDLGAPTYPFQREGFWPTREALAQLPPARRGRALLDLVQNRVAKTLGLVRPADPGRAFTDLGFTSLTALELRNSIA
EETGLPLPASLVFDHPNARALAAYLD
SEQ ID NO: 133
EPLAIVGMACRLPGGISSAEELWRLVAEGGDAIGPFPGDRGWDIDALYDPDPDAAGRTYTRSGGFLPGAGDFDAAFF
GISPREAQAMDPQHRQLLETSWEALEHAGIDPAGLRGRDVGVFAGFSGQDYIAEMGVGPAEAGGYQVTGRAASVLSG
RLSYFYGFEGPAVTVDTACSSSLVALHLAGQSLRDGESSLALVGGVTVMSSPGLFVEFSRQRGLAPDGRCKAFSVDA
DGTGWSEGVGVLVVERLSDARRNNHQILAVVRGSAVNQDGASNGLTAPNGPSQQRVIRQALAQSGLSVGDVDVVEAH
GTGTALGDPIEAQAVLATYGSRTGGEPVRLGSLKSNIGHTQAAAGIASLIKMVQSIRYGVMPRTLHVSEPSPLVDWA
AGRVELLTSDVPWPEGVRRAAVSAFGISGTNAHVILEEAPAPAEAVPSIRPVVSGPELPLVFSARDADALAAQSRLT
DGPGVAHALVTARTVFDHRSVRMGDVTVTGVATPDPEVVFVFPGQGTQWPGMGRDLMAASPVFADRMNECALALSPY
LDLWAAIDAPDRVETLQPASWAVMVSLAAVWQAAGVQPAAVIGHSQGEIAAACVAGSLSLADAAAVVALRSRAIASL
AGKGAMASIPLPAEEIELVDEVWVAALNGPSSTVVAGTPDAVEQIRSRYDGRRIAVDYASHTPHVEALRGQVVSVPS
QSPAVPWFSTVDSAWVEGPLDEDYWFRNLRQPVQFGPAAAGFDNAVFVEVSARPVLIPALDASVTVPSLRRDDGGPE
RMLASLAQAFVAGVAVDWTTIVPPAPHVDLPTYPFRRQRHWIDMERLGQLPPGDRDRFLLDLVRDAAAAVLGHGSRE
TVPASAAFKELGFDSLIAVQLRNAVAAATGVSLPATVTFDHPTPQALAVLL
SEQ ID NO: 134
EPLAIVGMACKFPGGVDSPERLWEMVEAGEDVIGPFPDDRGWDVDGGYDPDPEKAGSWYARAGGFLAGAADFDAAFF
GINPREALAMDPQQRLLLEVAWEAFERSGIAPDSLRGTDTGVFVGTFGQGYGRLVAAGAPGLEAYSGTGNTGSVASG
RLSYVFGLEGPAVTVDTACSSSLVALHQAGRSLQSGECSLALVAGVTVMSTPDSFVEFSRQRGLSPDGRCKAFAAAA
DGTGFSEGAGVLVVERLSDARRNNHQILALVRGSAVNQDGASNGLTAPNGPSQQRVITAALTDARLTTTDIDLVEAH
GTGTTLGDPIEAQAILATYGNRTTGNPVHLGSVKSNLGHTQAAAGIAGVIKAIQAIRHTTMPKSLHIDQPSPHVDWT
SGRVELLTSNQPWPATDRPRRAAVSSFGVSGTNAHVILEEQTPVEEPPPASAGPVPLALSARTPEALTAQEKAVRGL
PDGDRRRAAPALALGRAALPHRAVLLGDSVIRGTASADDGRPVFLFPGQGAQWAGMGRELMAASPVFAERMRECAVA
LAGFVDWDLFAVLDDAEALRRTEIVQPASWAMMVSLAALWESWGVRPAAVVGHSQGETAAAVVAGAIGLRDGARLSA
TRSRVLALLAGHGALASIALPAGEVEVVDGVSVAAVNGPRATLISGDPAGVEAVTARYEASGVRVRRIPADVASHSP
HVERAEETLLAALAGIEARVPGVPWLSTATGDWITEPVDERYWYRNLRSPVLFHPAITTLRDRGHRLFLEISTHPQL
LPAMEDDLLTVGSLRRDDGDLDRMHAALAEAWAAGADVDWRAFLGSGPVRALDLPTYPFQRRRFWPEAGALPPAERE
RALVEIVRDQAAAVLGDPDAGALTPGTAFRDLGFDSLTAVQLRNHLATATGLTLPATVIFDHPTPRALATFLD
SEQ ID NO: 135
EPLAVVGMACRLPGGVSSPDQLWDLVVSGGDGIGPFPGDRGWATDEIYDPDPDASGKTYVREGGFLDSAGDFDAAFF
GISPREALAMDPQQRLLLETSWEAFEHAGIDPAGLRGGDTGVFVGGFTQAYGVGTADLEGYAATGTVGSVLSGRLSY
FYGFEGPAVTIDTACSSSLVALHQAGQALRQGECTLAVVGGVTVMPTPVVFQEFSRQRGLAADGRCKAFADEADGTG
FAEGAGVLLVCRLSDARRDGRRILAVVRGSAVNQDGASNGLTAPNGPSQQRVIRAALASARLGPGDVDLIEGHGTGT
TLGDPIEAQALLATHGSGASPVRLGSLKSNIGHTQAAAGVAGVIKVIQALRHGLMPRTLHVGTPSSQVDWSAGNVEL
LTSNLPWPATDRPRRAAVSSFGISGTNAHVILEEAPAPAAVPSITPVVSGPALPLVFSARDSGALAARTRLTDGPGV
AFALATSRSMFDHRAVRIGDLSVSGVAVADRRVVFVFPGQGTQWAGMGRALMDASPVFAERMNECAAALSPYLDLWE
AIDAPDRVETLQPASWAVMVSLAAVWQAVGVEPAAVIGHSQGEIAAACVAGSISLPDAAAVVALRSKAIASLAGKGA
MASIPLPPDQIDLIDQVWIAALNGPSSTVVAGSPEAVEQVRARYDGRRIAVDYASHTPHVEALRGQVVSVPSQAPDI
PWFSTVDSAWVEKPLDGDYWFRNLRQPVQFGPAAARFDDAVFIEVSARPVLIPALDTSVTVPSLRRDDGGPERMLAS
LAQAFVAGVAVDWTTIVPPAPFVELPTYPFQRRRYWIDSSEEALRDLVREQAAAVLGYPDPSRITPGVAFRDLGFDS
LTAVQLRNALSAATGLRLSATVAFDHPTPAALAAAL
SEQ ID NO: 136
EPIAIVGMACRLPGDVSSPDELWDLVESGRDAIGPFPADRGWNLDELYDPDPDATGRSYVREGGFLAGAADFDAEFF
GINPREALAMDPQQRLVLEVAWEAFERAGIAPDSLRGTDTGVFLGAFAGGYLTLVNGAADLEGYAGTGNSVSVLSGR
LSYVLGLEGPAVTVDTACSSSLVALHQAAQALRQGECSLAVAGGVTVMSTPDSHVEFSRQRALSPDGRCRAFADGAD
GTGWSEGAGVLVVERLSEARRRGHTVLAVVRGSAVNQDGASNGLTAPNGPSQQRVIRSALASAGLGFGDVDLVEGHG
TGTALGDPIEAQALLATYGSAGTPVWLGSLKSNIGHTQAAAGVAGVIKAVEAMRRGVMPRTLHVDAPSSHVEWSSGS
VELLTANRPWDGVGRPRRAAVSSFGISGTNAHVILEGVPAPEPAGTGQAPLLLSARSVSALAEFESRIAGLVPSRDL
AATLAGRAFFDHRAVILPDGDVVRGRAGGAPLVFVFAGQGSQRADMASRLAEEFPAFAAAHERVWSLLDVDEGLDVD
QTGLAQPALFAYEVALAELLGVRPDAVIGHSIGELAAAYVAGALSLEDACRLVSARARLMQDLPSGGAMVSVRVSEE
AARAVLRDGVEIAAVNGPQAIVLSGDEDAVLAAAAELGEFRRLRTSHAFHSGRMEPMLEEFRLVASSVVFREPEIAM
SFVPSADYFVRQVRETVRFGEQVASFDAGAVFVEVGPDGSLSRLTGGVSAAEPLTALAYLWVRGVGVDWAPYVGGGR
LDLGAPTYPFQRERYWVRPRLAGRTTDERDALLISLVRDDVASVLGHPDRRRLATDRPLLELGFDSLTALRLRNRLA
AATDIALPATLIFDYPNIQAIAVHL
SEQ ID NO: 137
EPLAVVGMACRYPGGVASADDLWRLVTAGGDAIGPFPDDRGWELESLVDPDPEAVGRSTTGQGGFLADAAGFDAAFF
GISPREATAMDPQQRLLLEVSWAALEHAGLRADALRGSATGVFMGSNGQDYAGLLAGAPELEGWIGTGVSASVVSGR
LSYFYGFEGPAVTVDTACSSSLVALHLAAQSLRTGESSLALVGGVTVMTSPTVFRSFSRQRGLAPDGRCKAFSAGAD
GTGWSEGVGVLVVERLSDARRNNHQILALVRGSAVNQDGASNGLTAPNGPSQQRVITAALTDARLTTTDIDLVEAHG
TGTTLGDPIEAQAILATYGNRTTGNPVHLGSVKSNLGHTQAAAGIAGVIKAIQAIRHTTMPKSLHIDQPSPHVDWTS
GRVELLTSNQPWPATDRPRRAAVSSFGVSGTNAHVILEEAPAPAEAVPPIRPVVSGPALPLVFSARDSGALATRTHL
SDGPGVAYALATSRSMFDHRSVRIGDMTVTGVATTDPEVVFVFPGQGTQWAGMGRALMDASPVFAERMNECAAALEP
YLDLWAAIDAPDQVETLQPASWAVMVSLAAVWQAAGVRPAAVIGHSQGEIAAACVAGSITLQDAAAVVALRSKAIAA
SLGKGAMASIPLPVEEIELIDEVWVAALNGPSSTVVAGAPDAVEQVRARYDGRRIAVDYASHTPHVEALRGQVVSVP
SQTPAVPWFSTVDSEWVEGQLDDDYWFRNLRQPVQFGPAAARFDDAVFIEVSARPVLIPALDASVTVPSLRRDDGGP
ERMLASLAQAFVAGVAVDWTTIVPPAPFVDLPTYPFQHERFWIEGRVAAATGAERPRILLEVVLAETATVLGHGGAA
AIGPDRAFQDLGFDSLTAVELRNRLAAATALTLPTTLVFNHPTPEALAAHL
SEQ ID NO: 138
ELVAIVGMACRLPGDVASPEDLWRLVAEGRDAVGPFPADRGWNLGTLDDPDAAGRSYVKEGGFLAGAAHFDPGFFGI
GPREALGMDPQQRILLEIAWESLERARIAPGSLRGSETGVYVGAAAQGYGVDAPLEGNLLTGGSTSAMSGRVAYSLG
LHGPAVTIDTACSSSLVALHLAAQALRNGECTLALAGGVAVMASPVLFTEFSRQRGLAPDGRCKAFAAAADGTGWSE
GAGLVVLERLSDAERHGHPVLAVIRGSAVNSDGASNGLTAPNGTAQRRVIRSALRAAGLGAGDVDVVEAHGTGTTLG
DPVEADALIATYGQRPGMPPVRIGSLKSNIGHTVAAAGVAGVIKMVEAMRHDTMPRTLHVDRPTPHVDWSAGAAELL
TGEQPWPRGDRPRRAAVSAFGLSGTNAHLILEDVAPGAASGAEPPGAADETVPLLLSADDLPAVRDQAARLRAYLLA
RPELRMRDVAYALATTRTARPHRAAVAATEREFLRELALLAAGDQGPGTQLGEAVPHRRVAFLFDGQGTQRHGMGRA
LHQRHPVFAAAWDEVCAALDPLLGRGVADVYFAEAGRDLADDPLYTQAGLFALEVALYRLLTSWGVTPDAVAGHSVG
EVAAAHVAGVLSLPDAAALLAARGAALRRLPAGAMAAIRASEADTRAVLPPDLDVAAVNGPEMTVVSGAPDAVDRFI
AEQAGAGRQVRRLRVGRAYHSRHVDAVLAEFGATLSALTFHEPVLPVVSTVTGRPAGAGDLTTPEYWLRHARRPVRF
GAALAALSELGMDSFVEVGPSGSLSSMAGETVAGTFHPMLDRRVPDEIAVAAGELFTAGMVLDWAAVLAGGRTIDLP
VYPFRREFYWLGARRYDLMAAAERRDALLDLVRVQVALLLGRADAIGVRDNTSFLDVGLDSLGASRLRNRLAAATGL
TLPGGVAFDHPTPARLADHL
SEQ ID NO: 139
EPLAIVGMACRLPGGVSSPEDLWRLVESGTDATSGFPVDRGWADSSMRGGFLDAAADFDAAFFGISPREALAMDPQQ
RLVLEASWEAFERAGIEPGSVRGSDTGVFMGAFSGGYGAGADLGGFGVTAGAVSVLSGRVSYFFGLEGPAVTVDTAC
SSSLVALHQAGHALRQGECSLALVGGVTVMSTPDIFAEFSRQGGLASDGRCKAFADTADGTSWSEGVGVLVVERLSD
ARAKGHQVLAVVRGSAVNQDGASNGLTAPNGPSQQRVIQAALTHAGLTTAEVDVVEAHGTGTTLGDPIEAQAVIATY
GRDRERPVLLGSLKSNVGHTQAAAGVSGVIKMVMALQHGVVPRTLHVDEPSRHVDWTAGAVRLATESQPWPDTGRPR
RAAVSSFGVSGTNAHVILEGVAEEPAQSEESSELVPLVISAKTPAALTRLEERLRAYLTAESNLSAVASTLAETRSL
FEHRAVLLGDDTIKGTAQPNPRVVFVFSGQGSQRAGMGDELAAAFPVFAKIRQQVWDLLDVPDLEVNDTGHAQPALF
ALQVALFGLLESWGVRPQALIGHSIGELAAGYVSGIWSLEDACTLVSARARLMQSLPPGGAMVAVPVSEQQARAVLT
DGVEIAAVNGPSSVVLSGDEEAVLRAAAALDGRSKRLVTSHAFHSARMEPMLDEFRAVAEQLTYRAPRIPMAVGEGP
EYWVRQVRETVRFGEQVAAHDGAVFVELGPEGTLARLIDGVAVLDREDEPRAALTALGKLHVRGVRVDWPLTSGRRV
DLPTYAFQRERYWATALTPAEREQALLKLVRDSAAVVLGYTDAVPVSGSFKDLGIDSLTAVELRNSLATTTGLRLPA
TLVFDYPTPATLAARL
SEQ ID NO: 140
EPLAIVGMACRLPGGVSSPEDLWRLVESGTDAIAPFPTDRGWDVEALFDPDPDAAGKSYCVRGGFLDGVADFDASFF
GISPREALAMDPQQRLILEASWEAFERAGIDPADARGSDTGVFMGAFTSGYGADLEGFGGTAGALSVLSGRVSYFFG
LEGPAVTVDTACSSSLFALHQAGYALRQGECSMALVGGVTVMATPRTFVEFSRQRGLASDGRCKAFGDTADGTGWAE
GVGVLVVERLSDAQAKGHRVLAVVRGSAVNQDGASNGLTAPNGPSQQRVIQAALHNARLTPADVDVVEAHGTGTTLG
DPIEAQAVIAAYGQGRDEPLLLGSLKSNVGHTQAAAGVSGVIKMVMALQHGVVPRTLHVDEPSRHVDWTAGEVRLVT
ENQSWPDTGRPRRAGVSAFGVSGTNAHVILEGPPTQPPATAPQEPAPLVISAKTPAALADYEGRLRAYLAATPGTDA
RALAVTRSLFEHRAVLLGDDTISGAAVTDPRVVFVFPGQGWQWLGMGVALRDSSVVFAERMTECAAALSEFVDWDLF
AVLDDPAVVDRVDVVQPACWAVMVSLAAVWQAAGVHPDAVVGHSQGEIAAACVAGAISLRDAARVVALRSRLIGERL
GQGAMASVTLPADEISLVDGVWIAAYNGPASTVIAGSPDAVDQMVGDRVRRIAVDYASHSPQVEQIKDELLDITADV
GSRTPTVPWFSTVDGSWIEGPLDADYWYRNLRQPVGFHPAVEALRALGETVFVEVSASPVLLPAMDDALTVATLRRD
DGTIARMHTALAEAHVHGVNVDWAAVLGVAARHVDLPTYAFQRQRFWADERELASLGPAEREQALRKLVSDTAAGVL
GYADPGAVPIKAAFRELGVDSLTAVELRNGLAKATGMRLPATMVFDYPTPHALAARL
SEQ ID NO: 141
EPLAIVGMACRLPGGVSSPEDLWRLVESGTDAISEFPADRGWDVENLYDPDPDAAGKSYCVRGGFLDAAAEFDASFF
GISPREALAMDPQQRLILEASWEAFERAGIEPGSVRGSDTGVFMGAFSGGYGADVEGFGATAGAGSVLSGRVSYFFG
LEGPAITVDTACSSSLVALHQAGYSLRQGECSLALVGGATVMAKPQSFVEFSRQRGLAADGRCKAFADAADGTGWAE
GVGVLLVERLSDAERNGHQVLAVVRSSAVNQDGASNGLSAPNGPSQQRVIRQALANARLTAADVDVVEAHGTGTTLG
DPIEAQALIAAYGQDREWPLLLGSLKSNVGHTQAAAGVSGVIKMVMALQHGVVPRTLHVDEPSRHVDWTAGAVRLVT
DNQPWPETGRPRRAGVSSFGVSGTNAHVILESPPTQPSGTFKKPAHEPQPLIISAKTPAALADYEDRLGAYLTAAPG
VDVPAVAATLAVTRSLFEHRAVLLGDNTVTGTAITDPRVVFVFPGQGWQWLGMGAALRGSSVVFAERMTECAAALSE
FVDWDLFAVLDDPAVVDRVDVVQPACWAVMVSLAAVWQAAGVHPDAVVGHSQGEIAAACVASAVSLRDAARVVALRS
RLISERLGQGAMASVALPADQIVLADGVWIAAHNGPTSTVVAGSPDAVEQMLGDRVRKIAVDYASHTPHVEQIKTEL
LGITAGIGSRTPTVPWFSTVDGSWIEGPLDADYWYRNLRQPVGFDAAVGRLRALGATVFVEVSASPVLLPAMDDAVT
IATLRRDEGSITRMHTALAEAHVLGVNVDWPTLLGDTDRRALDLPTYAFQRQRYWGDAAGLAPAEREQALLKLVRDS
AALVLGYAGGDAVPATDAFKDLGIDSLTAVELRNGLAKATGLRLPATLVFDYPTPQVLAARL
SEQ ID NO: 142
EPLAIVGMACRLPGGVSSPEDLWRLVESGTDATSGFPVDRGWADSSMRGGFLDAAADFDAAFFGISPREALAMDPQQ
RLVLEASWEAFERAGIEPGSVRGSDIGVFMGAYPGGYGIGADLAGFGATAGAGSVLSGRVSYFFGLEGPAVTVDTAC
SSSLVALHQAGHALRLGECSLALVGGVTVMATPDTFVEFARQGGLASDGRSKAFADSADGAGFSEGVGVLLVERLSD
AQRHGHRVLAVVRGSAVNQDGASNGLTAPNGPSQQRVIQAALAHAGLAPHEVDVVEAHGTGTTLGDPIEAQAVIATY
GQDRDEPLLLGSVKSNVGHTQAAAGVAGVIKMVMALRHGVVPQTLHVDEPSRHVDWTAGAVRLLTEKQPWPSTDRPR
RAGVSSFGISGTNAHVILEGVAEEPAQSEDSSELVPLVISAKTPAALTQVEERLRAYLTAESNLSAVASTLAETRSL
FEHRAVLLDGHAVRGVAESNPRVVFVFSGQGSQRAGMGDELAAAFPVFAKIRGQVWDLLDVPDLDVNDTGHAQPALF
ALQVALFGLLESWGVRPHALIGHSIGELAAGYVSGIWSLEDACALVSARARLMQALPPGGAMVAVPVSEQQARAVLT
DGVEVAAVNGPSSAVLSGDEEAVLRAAAALGGRWKRLATSHAFHSARMEPMLDEFRAVAEQLTYRAPRIPMAVGEGP
EYWVRQVRETVRFGEQVAAHDGAVFVELGPDGSLARLIDGIATLDRDDEPRVALTALAELHVRGVDVDWPLTSGRRV
DLPTYAFQRQRYWIDRAGRTPAEREQALLKVVRDSAATVLGHADGGSVGAAAAFKDLGVDSLTAVELRNSLAKATGL
RLPATLVFDYPTPAAVAVRL
SEQ ID NO: 143
EPLAIVGMACRLPGGVSSPEDLWRLVESGTDATSGFPTDRGWADSSMRGGFLVAAADFDAAFFGISPREALAMDPQQ
RLVLEASWEAFERAGIEPGTVRGSDTGVFMGAYPGGYGIGADLAGFGATAGAGSVLSGRVSYFFGLEGPAVTVDTAC
SSSLVALHQAGHALRQGECSLALVGGVTVMATPDLFVEFARQGGLASDGRCKAFGDTADGTGWAEGVGVLLVERLSD
AQAKGHRVLAVVRGSAVNQDGASNGLTAPNGPSQQRVIQAALHNARLTPADVDVVEAHGTGTTLGDPIEAQAVIAAY
GQGRDEPLLLGSLKSNVGHTQAAAGVSGVIKMVMALQHGVVPRTLHVDEPSSHVDWTAGAVRLVTENQSWPDTGRPR
RAAVSAFGVSGTNAHVILESSAAPSPTIPQPPSAEPMPLVISAKTPAALADYEGRLRAYLTAPGVDVPAVAATLAVT
RSLFEHRAVLLGGNTVTGTAVADPRVVFVFPGQGWQWLGMGAALRGSSVVFAERMTECAAALSEFVDWDLFAVLDDP
AVVDRVDVVQPACWAVMVSLAAVWQAAGVHPDAVVGHSQGEIAAACVAGALSLRDAARVVALRSRLIGERLGRGAMA
SVSLPADQIVLADGVWIAAHNGPASTVIAGGAGAVDQMVGERVRRIAVDYASHTPDVEQIQTELLDITADVGSQAPV
VPWFSTVDGVWVDGPLDRDYWYRNLRQPVGFHPAVEALQALGETVFVEVSASPVLLPAMDDAVTVATLRRDEGSITR
MHTALAEAHVLGVNVDWPTVVGDTDRRTLDLPTYAFQHHRYWISAAARLDGLTAAEKHSLLLDIVLANAATVLGHHT
VDTIAPDKPFKDLGIDSLTAVELRNGLAKATGLRLPATLVFDYPTPDMAAARL
SEQ ID NO: 144
EPLAIVGMACRLPGGVSSPEDLWRLVESGTDAISDFPTDRGWADAAGAPYSPQGGFVDAAADFDAAFFGISPREALA
MDPQQRLVLEASWEAFERAGIEPGTVRGSDTGVFMGAYPGGYGIGADQAGFGTTAGAGSVLSGRVSYFFGLEGPAVT
VDTACSSSLVALHQAGHALRQGECSLALVGGVTVMGTPDIFAEFSRQGGLASDGRCKAFGDDADGTGWGEGVGILLV
ERLSDAQRHSHRVLAVVRGSAVNQDGASNGLTAPNGPSQQRVIQAALAHAGLAPHEVDVVEAHGTGTTLGDPIEAQA
VIATYGQDRDEPLLLGSVKSNVGHTQAAAGVAGVIKMVMALRHGVVPRTLHADQPSRHVDWTAGAVRLATENQPWPA
IDRPRRAGVSSFGISGTNAHVILEGVAEEPAQSEESSPLMPLVISAKTPAALTRLEERLRAYLAAKPETSLGAVAST
LAETRSLFEHRAVLLNGDVVRGVAEPNPRVVFVFSGQGSQRAGMGDEVAAAFPVFAKIRRQVWDLLDVPDLDVNDTG
HAQPALFALQVALFGLLESWGVRPDALIGHSIGELAAGYVSGIWSLEDACALVSARARLMQALPAGGAMVAVPVSEQ
QARAVLTDGVEIAAVNGPSSVVLSGDEEAVLRAAAGLGSRWKRLATSHAFHSARMEPMLDEFRVVAEQLSYKTPRIP
VAVGEGPEYWVRQVRETVRFGEHVAAHDGAVFVELGPDGSLARLIDGIATLDRDDEPRAALTALAELHVRGVDVDWP
LTSGRRVDLPTYAFQRQRYWTTAGLTRAEREQALLKLVRDTAAVVLGYGDGNAVPVTAAFKDLGVDSLTAVELRNGL
AEAIGLRLPATLVFDYPTPATLAVRL
SEQ ID NO: 145
EPLAIVGMACRLPGGVESPDDLWRLVESGTDAITGFPTDRGWPDVTGTSHSQHGGFLHTAADFDAAFFGISPREALA
MDPQQRLILEASWEAFERAGINPADAHGTDTGVFMGAFSAGYDADRDDSPATAGAVSVLSGRISYFFGLEGPAMTVD
TACSSSLVALHQAGYSLRQGECSMALVGGVTVMATPRTFVEFSRQGGLASDGRCKAFGDTADGTGWSEGVGVLVVER
LSDARAKGHRVLAVVRSSAVNQDGASNGLTAPNGPSQQRVIQAALHNAHLTPADVDVVEAHGTGTTLGDPIEAQAVI
AAYGQDRDEPLLLGSIKSNVGHTQAAAGVSGVIKMVMALRHGVVPRTLHADQPSRHVDWNAGAVQLVTENQSWPETG
RPRRAAVSSFGISGTNAHVILEGVPEQPAQPEPPSERVPLMISAKSTSALSQLEDRLRAYLAARPEASLGAVASTLA
TRSLFEHRAVLLDGQVVKGVAEPNPRVVFVFSGQGSQRAGMGDELAAAFPVFAKIRGQVWDLLDVPDLDVNDTGHAQ
PALFALQVALFGLLESWGVRPDALIGHSIGELAAGYVSGIWSLEDACTLVSARARLMQALPAGGAMVAVPVSEQQAR
AVLTGGVEIAAVNGPSSVVLSGDEGAVLRAAAALGGRWKRLATSHAFHSARMEPMLDEFRAAAEQLTYQTPRIPMVV
GDGPDYWVRQVRETVRFGEQVAAHDGAVFVELGPDRSLARLIDGIATLDRDDEPRAALTALAELHVRGVDVDWPHDG
QLVDLPTYAFQRERYWATALAALPLAEREQALLAVVSDNAAVVLGYAEGRDVTQTAAFKDLGVDSLTAVELRNTLAK
ATGLRLPATIVFDYPTPDTLAARL
SEQ ID NO: 146
EPLAIVGMACRLPGGVSSPEDLWRLVESGTDAISRFPDDRGWDVEGLFDPDPDAPGKSYSVEGGFLDAVADFDAAFF
GISPREALAMDPQQRLVLEASWEAFERAGIEPGSVRGSDTGVFMGAYSGGYGIGADLPGLGVTAGAVSVVSGRVSYF
FGLEGPAVTVDTACSSSLVALHQAGHALRRRECSLALVGGVTVMATPFGFVEFSRQRGLAADGRCKAFADTADGTSW
SEGVGVLVVERLSDARANGHQVLAVVRGSAVNQDGASNGLTAPNGPSQQRVIQAALAHADLAPHEVDVVEAHGTGTR
LGDPIEAQAVIATYGQGRDEPLLLGSIKSNVGHTQAAAGVSGVIKMVMALRHGVVPQTLHVDEPTQHVDWTAGAVRL
ATENQPWPDTGRPRRAGVSSFGVSGTNAHVILEGVAEEPAQSEESSELVPLVISAKTPAALTRLEERLRAYLSAESN
LSAVASTLAETRSLFEHRAVLLGDDTIKGTAQPNPRVVFVFSGQGSQRAGMGDELAAAFPVFARIRRQVWDLLDVPD
VSVDDTGFAQPALFALQVALFGLLESWGVRPDALIGHSIGELAAGYVSGIWSLEDACTLVSARARLMQALPAGGAMV
AVPVSEQQARAVLTGGVEIAAVNGPSSVVLSGDEEAVLRAAAALGGRSKRLVTSHAFHSARMEPMLDEFQAVAEQLT
YQAPRIPMAVGDGPDYWVRQVRETVRFGDQVAAQDGAVFVELGPDRSLARLIDGIATLDRDDEPRAALTALAELHVR
GVDVDWPLTSGRRVDLPTYAFQRQRYWIDSALTPAEREQALLKVVRDSAAVVLGYTDAVPVSGSFKDLGIDSLTAVE
LRNSLAKVTGLRLPATLVFDYPTPATLAARL
SEQ ID NO: 147
EPLAIVGMACRLPGGVESPDDLWRLVESGTDAITGFPTDRGWPDVTGTSHSQHGGFLHTAADFDAAFFGISPREALA
MDPQQRLILEASWEAFERAGINPADAHGTDTGVFMGAYSGGYGIGADLAGFGATSGATSVLSGRVSYFFGLEGPAIT
VDTACSSSLVALHQAGHALRQGECAMALVGGVTVMATPDIFVEFSRQRGLAADGRCKAFADAADGTGWAEGVGVLLV
ERLSDAERNGHRVLAVVRSSAVNQDGASNGLTAPNGPSQQRVIQAALHNARLTPADVDVVEAHGTGTTLGDPIEAQA
VIAAYGQGRDEPLLLGSLKSNVGHTQAAAGVSGVIKMVMALQHGVVPRTLHVDEPSSHVDWTAGAVRLATENQSWPD
TGRPRRAAVSAFGVSGTNAHVILESSAAPSPTIPQPPSAEPMPLVISAKTPAALADYEDRLRAYLTNPGVDVPAVAA
TLAMTRSLFEHRAVLLGGNTVTGTAVADPRVVFVFPGQGWQWLGMGAALRGSSVVFAERMTECAAALSEFVDWDLFA
VLDDPAVVDRVDVVQPACWAVMVSLAAVWQAAGVHPDAVLGHSQGEIAAACVAGAISLQDAARVVALRSQAISGLSG
KGAMASIALPADQIALPDGAWIAAHNGPASTVVAGSPDAVEQMLGDRVRKIAVDYASHTPHVEQIQTELLDITAGIG
SRTPTIPWFSTVDGMWVDGPLDRDYWYRNLRQPVGFHPAVEALQALGETVFVEVSASPVLLPAMDDAVTVATLRRDE
GSITRMHTALAEAHVLGVNVDWPTLLGDTGRRTLDLPTYAFQHHRYWINGSRLIGRTTAEQHRLMLAFVLGNVASVL
GHGSADAIAADKPFKDLGMDSLTSVELRNSLAKATELRLPATIVFDHPTADALAAHL
SEQ ID NO: 148
EPIAIVSMACRVPGGVTSPEGLWRLVESGTDAISAFPGDRGWDIANLYSPDPDAPGKSYSVQGGFLDGAAAFDASFF
GISPREALGMDPQQRVLLETAWEAVERARIDPRSLRGRDVGVYVGGAAQGYGLGAAEAHRDNLITGGSISLLSGRLS
YALGLEGPGLTVDTACSSSLVALHLAAQALRQGECSLALVSGVSVMPTPDVFVEFSRQRGLASDGRCKSFAASADGT
SWSEGVGVLVLERLSEARRLGHQVLAVVRGTAVNSDGASNGLTAPNGAAQQRVIRQALANAGLSTADVDAVEAHGTG
TTLGDPIEAEAILATYGKDRSTPVWLGSLKSNIGHTMAASGVLGVIKMVEAMRHGVLPRTLHVDEPSPHVDWAAGEV
ALLTENQTWPGDVRPRRAGVSSFGLSGTNAHVVLEQDEAPAAPVTTKESGPLPWVLSAQSPKALRQRAGQLATALAE
DSTWHPLDVAYSLATTRSDFAHRAVVVGADRELLRTLGKVADGAGWPGLTTGTAKARRVAFLFDGQGTQRLTMGQGL
YGSFPAFARAWDTVSAEFGKHLDHPLADVYFDGSGGAATADLVDDPLYAQAGIFAVEVALVELLAEWGVRPDVVTGH
SIGEAAAAYTAGMLSLSDVTTLIVARGAALRSAPPGAMLALRAGEQEVRNFLDGTGAALDLAAVNGPAAVVVSGAPD
AVTDFASAWTASGREARRLKVRRAFHSRHVEGVLDDFRTALESLSFRTPLLPVVSTVTGRLIDPAEMGTPEYWLDQV
RQPVRFQEAVQELAGQGVGTFVEVGPSGTLASAGMECLDGDASFHALLRPRSAEDVGVLTALAELHAGGTAIDWPTV
LAGGRPMDLPVYPFQHQSYWLVSTDEPRTTLELVHLEVARVLGITDPDTVLDDASFLELGFDSLGGVRLRNRLAQVT
GLTLPPTLLFDHVTPAALAAELD
SEQ ID NO: 149
EPLAIVGMACRLPGGVSSPEDLWRLVESGTDAISGFPADRGWDVENLYDPDPEAAGKSYCVQGGFLDSAGGFDASFF
GISPREALAMDPQQRLVLEASWEAFERAGIEPGSLRGSDTGVFMGAYPGGYGVGADLGGFGATAGAVSVLSGRVSYF
FGLEGPAVTVDTACSSSLVALHQAGYALRQGECSLALVGGVTVMATPQSFVEFSRQRGLASDGRCKAFADAADGTGW
AEGAGVLLVERLSDAQAKGHQVLAVVRGSAVNQDGASNGLSAPNGPSQQRVIRAALSNAGLSTAEVDVVEAHGTGTT
LGDPIEAQALLATYGQDREQPLLLGSVKSNLGHTQAAAGVSGVIKMVMALQHGLVPRTLHVDEPSRHVDWTDGAVAL
VTENQPWPDMGRPRRAGVSSFGISGTNAHVILESAPPTQAVDDVPPAEAPVVASELVPLVISARTLPALVEYEDRLR
AYLAASPGVDVRGVASTLAVTRSVFEHRAVLLGDDTVTGTTVSDPRVVFVFPGQGSQRAGMGEELAAAFPVFARIHQ
QVWGLLDVPDLEVNETGYAQPALFALQVALFGLLESWGVRPDAVVGHSVGELAAGYVSGLWSLEDACTLVSARARLM
QALPPGGVMVAVPVSEDEARAVLGEGVEIAAVNGPSSVVLSGDETAVLQAAAALGKSTRLATSHAFHSARMEPMLEE
FRTVAERLTYQTPRLAMAAGDRVTTAEYWVRQVRDTVRFGEQVASYEDAVFIELGADRSLARLVDGVAMLHTDHEAQ
AAISALAHLYVNGVTVDWTALLGDAPATRVDLPTYAFQHQRYWLEGWLAALAPEERAKALLKVVRDTAATVLGHADA
RTIPVTGAFRDLGIDSLTAVELRNGLAKVTGLRLPATLVFDYPTPAVLAARL
SEQ ID NO: 150
EPLAIVGMACRLPGGVSSPEDLWRLVESGTDAISGFPADRGWDAESLFDPDPAVGKSYCVEGGFLDSAASFDAGFFG
ISPREALAMDPQQRLIMEVSWEAFERAGIEPGSVRGSDTGVFMGAYAGGYGAGADLGGFAATASATSVLSGRVSYFF
GLEGPAITVDTACSSSLVALHQAGYALRQGECSLALVGGVTVMATPQSFVEFSRQRGLASDGRCKAFADSADGTGWA
EGVGVLLVERLSDAQAKGHQVLAVVRSSAVNQDGASNGLSAPNGPSQQGVIQAALSNAGLAAHEVDVVEAHGTGTTL
GDPIEAQAVIATYGQDRERPLLLGSLKSNIGHAQAASGVSGVIKMVMALQHNTVPRTLHVDEPSRHVDWAAGAVELV
RENQPWPGTDRPRRAGVSSFGVSGTNAHVILESAPPAQPAEEAQPVETPVVASDVLPLVISAKTQPALTEHEDRLRA
YLAASPGVDTRAVASTLAVTRSVFEHRAVLLGDDTVTGTAVSDPRVVFVFPGQGWQWLGMGSALRDSSIVFAERMAE
CAAALREFVDWDLFTVLDDPAVVDRVDVVQPASWAMMVSLAAVWQAAGVRPDAVIGHSQGEIAAACVAGAVSMRDAA
RIVTLRSQAIAGLAGRGAMASVALPAQDVELVDGAWIAAHNGPASTVIAGTPEAVDHVLTAHEARGVRVRRITVDYA
SHTPHVELIRDELLDITSDSSSQAPVVPWLSTVDGSWVDSPLDVEYWYRNLREPVGFHPAVGQLQAQGDTVFVEVSA
SPVLLQAMDDDVVTVATLRRDDGDATRMLTALAQAYVHGVTVDWPAILGTTTTRVDLPTYAFQHQRYWVEWLAALAP
AEREKALLKVVCDSAAVVLGHADARTIPVTGAFKDLGVDSLTAVELRNSLVKATGLRLPATMVFDYPTPTALAARLD
SEQ ID NO: 151
EPLAIVGMACRLPGGVSSPEDLWRLVESGTDAVSGFPTDRGWDVEGLFDPDPDAAGKSYRAEGGFLDTAAGFDAGFF
GISPREALAMDPQQRLLLEVSWEAFERAGIEPGSVRGSDTGVFIGAFPVGYGAGAAREGYGATAAPNVLSGRLSYFF
GLEGPAITMDTACSSSLVALHLAAQALRNGECSMALAGGVTVMATPEVFTEFARQRGLASDGRCKAFADSADGAGFS
EGAGLLLVERLSDARRNGHQVLAVVRGSAVNQDGASNGFTAPNGPAQQRVIRQALANAGLTTAEVDVVEAHGTGTTL
GDPIEAQAVIATYGQDREQPLLLGTLKSNVGHTQAAAGVSGVIKMVMALQHSTVPRTLHVNEPSRHVDWSAGAVELV
TENQSWPVTGRPRRAGVSAFGVSGTNAHVVLESAPPAQSVNNAQPVATPVVASELVPLVISAKTLPALTEHEDRLRA
YLAASPGADMRAVGSTLALTRSVFEHRAVLLGHDTVTVTGTGTAVSNPRVVFVFPGQGWQWLGMGSALRGSSVVFAE
RMAECAAALSEFVDWDLFAVLDDPAVVDRVDVVQPASWAVMVSLAAVWQAAGVRPDAVIGHSQGEIAAACVAGAVSL
RDAARIVTLRSQAIAGLAGRGAMASVALPAHEIELVDGAWIAAHNGPASTVVAGAPEAVDRVLAVHEARGVRVRRIA
VDYASHTPHVELIRDELLDITAGIGSQAPVVPWLSTVDGTWVEGPLDVEYWYRNLREPVGFDSAVGQLRAEGDTVFV
EVSASPVLLQAMDDDVVTVATLRRDDGDATRMLTALAQAFVEGVTVDWPAILGTATTRVDLPTYAFQHQRFWAEGWL
ARLAPVEREKALLKLVCDGAATVLGHADASTIPATAAFKDLGIDSLTAVELRNSLTKATGLRLPATLVFDYPTPTAL
AARL
SEQ ID NO: 152
EPLAIVGMACRLPGGVSSPEDLWRLLESGTDAVSGFPTDRGWDVENLFGPAAGDSYRLQGGFLDAAAGFDASFFGIS
PREALAMDPQQRLVLEVSWEAFERAGIEPGSVRGTDTGVFMGAYPGGYGIGADLGGFGATASAVSVLSGRVSYFFGL
EGPAITVDTACSSSLVALHQAGYALRQGECSLALVGGVTVMATPQTFVEFARQGGLAGDGRSKAFADSADGAGFSEG
VGVLLVERLSDAQAKGHQVLAMLRSSAVNQDGASNGLTAPNGPSQQRVIQAALSNAGLAAHEVDVVEAHGTGTTLGD
PIEAQALLATYGQDREQPLLLGSVKSNLGHTQAAAGVSGVIKMVMALQRGFVPRTLHVDEPSRHVDWSAGAVALVTE
NQPWPDMGRARRAGVSSFGISGTNAHVILESAPPTQPADNAVIERAPEWLPMVISARTQSALTEHEGRLRAYLAASP
GVDMRAVASTLAMTRSVFEHRAVLLGDDTVTGTAATDPRVVFVFPGQGSQRAGMGEELAAAFPVFARIHQQVWDLLD
VPDLEVNETGYAQPALFALQVALFGLLESWGVRPDAVVGHSVGELAAGYVSGLWSLEDACTLVSARARLMQALPAGG
VMVAVPVSEDEARAVLGEGVEIAAVNGPSSVVLSGDEAAVLQAAEGLGKWTRLATSHAFHSARMEPMLEEFRTVAEG
LTYRTPQVSMAAGDQVTTTEYWVRQVRDTVRFGEQVASYEDAVFVELGADRSLARLVDGVAMLHGDHEAQAAVSALA
HLYVNGVTVDWPALLGDAPATRVDLPTYAFQHQRYWLEGRWLAALAPEERAKALVKVVCDSAATVLGHADVDSIPVT
AAFRDLGVDSLTAVELRNSLTKATGLRLPATLVFDYPTPGALAARL
SEQ ID NO: 153
EPLAIVGMACRLPGGVSSPEDLWRLVESGTDAISGFPTDRGWDVENLSDPDAAGKSYCVEGGFLATAANFDASFFGI
SPREALAMDPQQRLVLEVSWEAFERAGIEPGSVRGSDTGVFMGAFPGGYGIGADLEGYGATAGLNVLSGRLSYFFGL
EGPAVTVDTACSSSLVALHQAGYALRQGECSLALIGGVTVMATPHTFVEFSRQRGLASDGRCKAFADSADGTGWSEG
VGVLLVERLSDAQAKGHQVLAVVRSSAVNQDGASNGLSAPNGPSQQRVIRQALANAGLTTAEVDVVEAHGTGTTLGD
PIEAQAVIATYGQDRDQPVLLGSVKSNVGHTQAAAGVSGVIKMVMALQHGLVPRTLHVDEPSRHVDWTDGAVELVTE
NQSWPEAGRPRRAGVSSFGVSGTNAHVILESAPPTQAVDDVRPADAPVVASVMASELVPLVISAKTQSALAEYEGRL
RAYLAASPGVDMRAVASTLAMTRSVFEHRAVIVGDDTVSGTAATDPRVVFVFPGQGSQRAGMGAELAAAFPVFARIH
QQVWDLLDVPDLEVNETGYAQPALFALQVALFGLLESWGVRPDAVIGHSVGELAAAYVSGLWSLEDACTLVSARARL
MQALPAGGVMVAVPVSEDEARAVLGEGVEIAAVNGPSSVVLSGDEAAVLQAAEGLGKWTRLATSHAFHSARMEPMLE
EFRAVAQGLTYHAPGVVMAAGDRVMTAEYWVRQVRDTVRFGEQVASYEDAVFVELGADRSLARLVDGVAMLHGDHET
QAAIGALAHLYVNGVTVDWTALLGDVPVTRVDLPTYAFQQQRYWAERWLAALAPAEREKALLKLVSDGAATVLGHAD
TSTIPATTAFKDLGIDSLTAVELRNSLAKATELRLPATLVFDYPTPTALAARLD
SEQ ID NO: 154
EPLAIVGMACRLPGGVSSPEDLWRLVESGTDAISGFPTDRGWDVENLYDPDPDAPGKSYSVQGGFLDAAAGFDASFF
GISPREALAMDPQQRLMLEVSWEAFERAGIEPGSVRGSDTGVFIGAYPGGYGIGADLGGFGTTAGAASVLSGRVSYF
FGLEGPAFTVDTACSSSLVALHQAGYALRQGECSLALVGGVTVMATPQTFVEFSRQRGLSADGRCKAFADAADGTGW
AEGVGVLLVERLSDAQANGHQILAVVRSSAVNQDGASNGLSAPNGPSQQRVIRAALSNAGLAPHEVDVVEAHGTGTT
LGDPIEAQAVIATYGQGRGEPLLLGSLKSNVGHTQAAAGVSGVIKMVMALQHSMVPRTLHVDEPSRHVDWSAGAVEL
VAENQPWPETGRPRRAGVSSFGISGTNAHVILESAPAQSVGDTAGSTPVLVSELVPLVISAKTQPALTEHEDRLRAY
LAASPGVDIRAVASTLAVTRSVFEHRAVLLGDETVTGTAVSDPRIVFVFPGQGWQWLGMGSALRDSSVVFAERMAEC
AAALSEFVDWDLFAVLDDPAVVDRVDVVQPASWAVMVSLAAVWQAAGVRPDAVIGHSQGEIAAACVAGAVSMRDAAR
IVTLRSQAIAGLAGRGAMASVALPAQDVELVDGAWIAAHNGPASTVIAGTPEAVDHVLTAHEAQGVRVRRITVDYAS
HTPHVELIRDELLDITSDSSSQTPLVPWLSTVDGTWVDSPLDGEYWYRNLREPVGFHPAVSQLQAQGDTVFVEVSAS
PVLLQAMDDDVVTVATLRRDDGDATRMLTALAQAYVHGVTVDWRAVLGDVPATRVDLPTYAFQHQRYWAEAWLVGLA
PEERAKALLKVVRDSAATVLGHADARSIPATGAFKDLGVDSLTAVELRNSLTKATGLRLPATMVFDYPTPADLAARL
SEQ ID NO: 155
EPLAIVGMACRLPGGVSSPEDLWRLLESGTDAVSGFPTDRGWDVENLYDMAGKSHRAEGGFLDAAAGFDAGFFGISP
REALAMDPQQRLVLEVSWEAFERAGIEPGSVRGSDTGVFMGAYPGGYGAGADLGGFAATASATSVLSGRVSYFFGLE
GPAFTVDTACSSSLVALHQAGYALRQGECSLALVGGVTVMATPELFTEFSRQRGLASDGRCKAFADSADGTGWAEGV
GVLLVERLSDAQAKGHQVLAVVRSSAVNQDGASNGLTAPNGPSQQRVIQAALSNAGLAAHEVDVVEAHGTGTTLGDP
IEAQAVIATYGQDRERPLLLGSLKSNIGHAQAASGVSGVIKMVMALQHNTVPRTLHVDEPSRHVDWAAGAVELVREN
QPWPGTDRPRRAGVSSFGVSGTNAHVILESAPPAQPAEEAQPVETPVVASDVLPLVISAKTQPALTEHEDRLRAYLA
ASPGVDTRAVASTLAVTRSVFEHRAVLLGDDTVTGTAVSDPRVVFVFPGQGWQWLGMGSALRDSSVVFAERMAECAA
ALSEFVDWDLFTVLDDPAVVDRVDVVQPASWAVMVSLAAVWQAAGVRPDAVIGHSQGEIAAACVAGAVSLRDAARIV
TLRSQAIAGLAGRGAMASVALPAQDVELVDGAWIAAHNGPASTVIAGTPEAVDHVLTAHEARGVRVRRITVDYASHT
PHVELIRDELLDITSDSSSQAPLVPWLSTVDGSWVDSPLDGEYWYRNLREPVGFHPAVGQLQAEGDTVFVEVSASPV
LLQAMDDDVVTVATLRRDDGDATRMLTALAQAYVHGVTVDWPAILGTATTRVDLPTYAFQHQRYWLRSWLAALAPAE
REKALLKLVCDSAAMVLGHADARSIPAAGAFKDLGVDSLMAVELRNGLVKATGLRLPATLVFDYPTPTVLAARLD
SEQ ID NO: 156
EPLAIVGMACRLPGGVSSPEDLWRLVESGTDAVSGFPTDRGWDVENLYDSDPEAAGKSYCVQGGFLDTAAGFDAGFF
GISPREALAMDPQQRLLLEVSWEAFERAGIEPGSVRGSDTGVFIGAFPVGYGAGFDREGYGATSGPSVLSGRVSYVF
GLEGPAITMDTACSSSLVALHLAAQALRNGECSMALAGGVTVMATPEVFTEFARQRGLASDGRCKAFADSADGAGFS
EGAGLLLVERLSDARRNGHQVLAVVRGSAVNQDGASNGLTAPNGPSQQRVIRAALSNAGLSTADVDVVEAHGTGTTL
GDPIEAQALLATYGQDREQPLLLGSLKSNIGHTQAASGVSGVIKMVMALRHGFVPRTLHVDEPSRHVDWAAGAVELV
RENQPWPGTDRPRRAGVSSFGVSGTNAHVVLESAPPAQPAEEEQPVETPVVASDVLPLVISAKTQPALTEHEDRLRA
YLAASPGADTRAVASTLAVTRSVFEHRAVLLGDDAVTGTAVTDPRVVFVFPGQGWQWLGMGSALRDSSVVFAERMAE
CAAALSEFVDWDLFAVLDDPAVVDRVDVVQPASWAVMVSLAAVWQAAGVRPDAVIGHSQGEIAAACVAGAVSLRDAA
RIVTLRSQAIAGLAGRGAMASVALPAHEIELVDGAWIAAHNGPASTVIAGTPEAVDHVLTAHEARGVRVRRITVDYA
SHTPHVELIRDELLGITAGIGSQPPVVPWLSTVDGSWVDSPLDGEYWYRNLREPVGFHPAVSQLQAQGDAVFVEVSA
SPVLLQAMDDDVVTVATLRRDDGDATRMLTALAQAYVHGVTVDWPAILGTTTARVLDLPTYAFQHQRYWVKSWLAAL
APEERAKALLRVVCDSAATVLGHADIDSIPVTAAFKDLGVDSLTAVELRNSLAKATGLRLPATLVFDYPTPTALAAR
LD
SEQ ID NO: 157
EPLAIVGMACRLPGGVSSPEDLWRLVESGTDAISDFPADRGWDVENLYDPDPDASGKSYCVQGGFLDSAGGFDASFF
GISPREALAMDPQQRLVLEVSWEAFERAGIEPGSLRGSDTGVFIGAYPGGYGAGAGADLEGYGTTSGPSVLSGRVSY
FFGLEGPAITVDTACSSSLVALHQAGYALRQGECSLALVGGVTVMATPDVFTEFARQRGLATDGRSKAFADSADGAG
FSEGIGVLLVERLSDAEAKGHQVLAVVRSSAVNQDGASNGLTAPNGPSQQRVIQTALSNAGLTTAEVDVVEGHGTGT
TLGDPIEAQAVIATYGQDREQPLLLGSLKSNIGHTQAAAGVSGVIKMVMALRHALVPRTLHVDEPSRHVDWTAGAVE
LVTENQPWPEIGRPRRAGVSSFGVSGTNAHVILESAPPTQAEDAAQPVEAPVMGSEPVPLVISAKTLPALNAHEDRL
RAYLAASPGVDMRAVASTLAMTRSMFEHRGVLLGDGTVSGTAVSDPRVVFVFPGQGSQRAGMGEELAAAFPVFARIH
QQVWDLLDVPDLDVNETGYAQPALFALQVALFGLLESWGVRPDAVIGHSVGELAAAYVSGVWSLEDACTLVSARARL
MQALPAGGVMVAVPVSEDEARAVLGEGVEIAAVNGPSSVVLSGDEAAVLQAAEGLGKWTRLATSHAFHSARMEPMLE
EFRAVAEGLTYRTPQVAMAAGDQVMTAEYWVRQVRDTVRFGEQVASFEDAVFVELGADRSLARLVDGVAMLHGDHEA
QAAVGALAHLYVNGVSVEWSAVLGDVPVTRVDLPTYAFQHQRYWLEGRWLAALAPAEREKALLKLVSDGAATVLGHA
DTSTIPATTAFKDLGINSLTAVELRNSLAKATELRLPATLVFDYPTPAALAARLD
SEQ ID NO: 158
EPLAIVGMACRLPGGVSSPEDLWRLLESGTDAVSGFPTDRGWDVENLYDMAGKSHRAEGGFLDAAAGFDAGFFGISP
REALAMDPQQRLVLEVSWEAFERAGIEPGSVRGSDTGVFMGAYPGGYGIGADLGGFGATASSVSVLSGRVSYFFGLE
GPAFTVDTACSSSLVALHQAGYALRQGECSLALVGGVTVMATPQTFVEFSRQGGLASDGRCKAFADAADGTGWAEGV
GVLLVERLSDARRNGHQVLAVVRGSAVNQDGASNGLTAPNGPSQQRVIRAALSNAGLSTAEVDVVEAHGTGTTLGDP
IEAQALIATYGQDRDQPVLLGSVKSNLGHTQAAAGVSGVIKMVMALQHGLVPRTLHVDEPSRHVDWSAGAVQLVTEN
QPWPDMGRARRAGVSSFGISGTNAHVILESAPPTQPADNAVIERAPEWVPLVISARTQSALTEHEGRLRAYLAASPG
VDMRAVASTLAMTRSVFEHRAVLLGDDTVTGTAVSDPRAVFVFPGQGSQRAGMGEELAAAFPVFARIHQQVWDLLDV
PDLEVNETGYAQPALFAMQVALFGLLESWGVRPDAVIGHSVGELAAAYVSGVWSLEDACTLVSARARLMQALPAGGV
MVAVPVSEDEARAVLGEGVEIAAVNGPSSVVLSGDEAAVLQAAEGLGKWTRLATSHAFHSARMEPMLEEFRAVAEGL
TYRTPQVSMAVGDQVTTAEYWVRQVRDTVRFGEQVASYEDAVFVELGADRSLARLVDGVAMLHGDHEIQAAIGALAH
LYVNGVTVDWPALLGDAPATRVDLPTYAFQHQRYWLEGRWLAALAPAEREDALLKLVRDSAALVLGHADASTIPAAA
AFKDLGIDSLTAVELRNSLAKATGLRLPNTTVFDYPTPAILATRL
SEQ ID NO: 159
EPLAVVGMACRLPGGVSSPEDLWRLVESGTDAISGFPADRGWDAESLFDPDPAVGKSYCVEGGFLDSAASFDAGFFG
ISPREALAMDPQQRLIMEVSWEAFERAGIEPGSVRGSDTGVFMGAYAGGYGAGADLGGFAATASATSVLSGRVSYFF
GLEGPAITVDTACSSSLVALHQAGYALRQGECSLALVGGVTVMATPQSFVEFSRQRGLASDGRCKAFADSADGTGWA
EGVGVLLVERLSDAQAKGHQVLAVVRSSAVNQDGASNGLTAPNGPSQQRVIQAALSNAGLAAHEVDVVEAHGTGTTL
GDPIEAQALIATYGQDRERPLLLGSLKSNIGHAQAASGVSGVIKMVMALQHNTVPRTLHVDEPSRHVDWAAGAVELV
RENQPWPGTDRPRRAGVSSFGVSGTNAHVILESAPPAQPAEEAQPVETPVVASDVLPLVISAKTQPALTEHEDRLRA
YLAASPGADIRAVASTLAVTRSVFEHRAVLLGDDTVTGTAVTDPRIVFVFPGQGWQWLGMGSALRDSSVVFAERMAE
CAAALREFVDWDLFTVLDDPAVVDRVDVVQPASWAMMVSLAAVWQAAGVRPDAVIGHSQGEIAAACVAGAVSLRDAA
RIVTLRSQAIAGLAGRGAMASVALPAQDVELVDGAWIAAHNGPASTVIAGTPEAVDHVLTAHEAQGVRVRRITVDYA
SHTPHVELIRDELLDITSDSSSQTPLVPWLSTVDGTWVDSPLDGEYWYRNLREPVGFHPAVSQLQAQGDTVFVEVSA
SPVLLQAMDDDVVTVATLRRDDGDATRMLTALAQAYVHGVTVDWPAILGTTTTRVDLPTYAFQHQRYWLKSRLTGRT
SVEQHRIMLELVLGEAASVLGHSSADAIATDTSFKDLGMDSLTAIELRNRLVAETGLQLPATMVFDYPTANALAAHL
SEQ ID NO: 160
EPIAIVAMACRLPGGVSSPEGLWHLVESGTDAISGFPTDRGWDVEGLFDPDPDAAGKSYCVQGGFLDTAADFDAPFF
GISPREALGMDPQQRLLLETTWEAIERAQIDPKSLRGRDVGVYVGGAAQGYGVGVDQQHDNGITGSSVSLLSGRVSY
ALGLEGPGVTVDTACSSSLVALHLASQALRQRECSLALVSGVSVMSSPAMFVEFSRQRGLSSDGRCKSFAASADGTI
WSEGVGVLVVERLSDARRLGHRVLATVRGSAVNSDGASNGLTAPNGTSQQRVIRQALANAGLTASDVDVVEAHGTGT
KLGDPIEAEAILATYGQERSAPAWLGSLKSNIGHAMAASGVLSVIKMVEAMGHGSLPRTLHVDAPSPHVDWTSGSVA
LLTEHQPWPDDTKLRRAGVSSFGLSGTNAHVVLEQYQAPAPPVTPVTPAPPTPVTPVTPNEPGPLPWVLSAQSPKAL
REQAGRLYASLAGDSEWNSLDIGYSLATTRSDFAHRAVAVGSGREFLRALSKLADGAPWPGLTTATATAKARRVAFL
FDGQGTQRLGMGKELYDSYPAFARAWDTVSAGFDKHLDHSLTDVCFGEGGSTTAGLVDDTLYAQAGIFAMEAALFGL
LEDWGVRPDFVAGHSIGEATAAYASGMLSLENVTTLIVARGRALRTTPPGAMVALRAGEEEVREFLSRTGAALDLAA
VNSPEAVVVSGEPEPVADFEAAWTASGREARKLKVRHAFHSRHVEAVLDEFRTALESLKFRAPALPVVSTVTGRLID
QDEMGTPEYWLRQVRRPVRFQDAVRELAEQGVGTFVEVGPSGALASAGVECLGGDASFHAVLRPRSPEDVCLMTAIA
ELHAGGTAIDWAKVLSGGRAVDLPVYPFQHQSYWLAPAEPSYADEPRTMLELVHMEVASLLGMADPGVILDDSSFLE
LGFDSLSAVRLRNRLSKATGLDLPSTLLFEHPTSAE
LAAHLD
SEQ ID NO: 170
MSRAELVRPIYDLLRANAERLGDKMAYVDSRLALTHAELAARTGRIAGHLVDMGVDRGDRVAILLGNRVENIESYLA
IARASAVAVPLNPDATEAEVAHFLSDSGAVVVITDSAHLDDVRRTAPAVTIVLVGEERIPPGVRSFAELATAEPQQS
ARDDLGLDEAAWMLYTSGTTGTPKGVLSTQGSGLWSAAYCDIPAWELTENDVLLWPAPLFHSLALHLCVLATTAVGA
TARIMNGFVASEVLEELTEHPCTVLVGVPTMFRYLLGAADTFEPRTSSLKMGLVAGSVAPASLIEGFEDVFGVPLLD
TYGCTETSGSLTVNWLSGERVPGSCGLPVPGLSLRFVDPISGADVADGEEGELWASGPSIMIGYHEQPEATAEVLSD
GWYRTGDLARRSETGHVTITGRIKELIIRSGENIHPHEIEAVALDVPGVKDAAAAGKRHPVLGEVPVLYVVPETGGV
DADMVLAVCRERLSYFKVPEEIYRVDAIPRTASGKVKRSSLTEEPAELLAGASGGETLHRLEWIPLELPEQAAPDGH
VVVRVDSLASDDSDLADADLADAVRDLARSWLADKRRADSTLVFVTRRAVHTGPSDIPSPEHAAVWDAIRREQTENP
GVFVVIDVDDDDDDDDDVNDREDDDTLLPALAGLGEPQVALRDGNPLVPRLAHANTPDSGSLTIPEDRAWLLEHSRS
GTLRDLALVPADAAERPLHPGEVRISVRAAGLNFRDVLIALGTYPGEGLMGGEAAGVVLEVGSEVSDLAPGDRVFGL
VGSAFGTVAIADRRLLGAIPDTWSFATAASIPIVFATAYYGLVDLAGLSAGESVLIHAAAGGVGMAATQIARHLGAR
IFATASVGKQHILSEAGLEDTRIAGSRTLAFREAFLNTTDGQGVDVVLNSLSGDFVDASLDLLPRGGRFLEMGKTDI
RDADRITADRPGTTYQAFDLLDAGPDRLREIIAELLPLFAQGVLRPLPLLTWDIRKARDAFSWMSRARHTGKITFTI
PRQLDPGGTVLIADGSGVLTGTVARHLVAEQGVRHLLLLSRSTPDEALINELIESGARVDTAVRDVSDRAGLEQALA
GISPEHPLTAVIHTGGPAVAHESHQLHGLTKRLDLAAFVVFSQDAPASVDALARRRRAEGLPTTTIAWGIPEAEAVV
VQGPLLGRAMASADSAHIVTRLNTVGLRALAAADTLPPLLRNLVGAQTDNTQQQAWSRQLLAAEAAREQALRDLVRS
CVMDILGLSAADRYAPDKTFREMGIDSLTAVELRNSLAKATDLRLPATMVFDYPTPAMLVVRLGE
SEQ ID NO: 171
MSREEFIQPIHDLLRVNAERLGDKIAYADSRRELTHAELRTRTGRIAGHLVDLAVERGDRVAILLGNRVETIESYLA
IARAGAIAVPLNPDATGAEVAHFLADSGAVLVITDSAHLDDVRRAAAAVTVVLVDEGPLPAGTRSFAELATAEPPTP
ARDDLGLDEAAWMLYTSGTTGTPKGVVSTQGSGLWSAANCDVPAWELTENDVLLWPAPLFHSLAHHLCLLATTAVGA
TARIMSGFVAGEVLHELEEHACTVLVGVPTMYHYLLGAVGEAGPRLPSLKMGLVAGAVSPPALIEGFERVFGVPLLD
TYGCTETTGSLTVNRLSGPRMPGSCGQAVPGISLRFVDPHTGAEVAEGEEGELWASGPSLMIGYHGRPDATREVLSD
GWYRTGDLARRSETGHVTITGRVKELIIRGGENIHPRDIEAVALELPGVRDAAAAGKQHPVLGEIPALYLVPDADGV
DAEAVLAACREKLSYFKVPEEIYRVDAIPRTLSGKVKRAALTEAPAELLSAASGNGSLYRLEWVPAETPPAGTGGPV
AVHVTRRAVATGPADLPDQEQAATWDALRGEQTGPGGPVLIDLDGADIDDARLSALASLGEPQIVVRDDTPLVARLA
REKSPALTIPGERAWVLEPDHSGVLQELALVAADTDVRPLRPGEVRIEVRAAGLNFRDVLVALGTDLGDGVFGAEGA
GVVLETGSDVRDLRPGDRVFGLLEGGHGSIAIADRRMLAVIPEGWSFATAASVPEVFVIAYYGLVDLAGLRAGESVL
IHAATGGVGMAATQIARHLGAQVYATAGVGKQHILRDAGLGDDRIADSRTTDFREAFRDSTQGRGVDVVLNSLKGDF
VDASLDLLADGGRFLELGQTDIRDAGEIAAERPGTTYHSFTRMNAGPDRLREIIAELLALFEQGVLRPSPVHTWDIR
HAREAFSWMSGGRHTGKMVLTMPQRIDPGGTVLIAGDSEALARIAARHLGVRHLLLDRGVADAAPDAVVCDVSDHDA
LERVLADLSPEHPLTAVIHTGGAAVTDEIRRLHDLTESLDLTDFVVFSQDAPAAVEAFARSRRAHGLPVRTIAWGIP
EADPVVADEHLLGRALASAEQAQIVARVNTAGLRALTAANALPTLLRNLIRAEPEETGQSAWPHRFEAAGADREEAL
LDLIRANVVDILSLPTADRYAPDRTFREMGIDSLTAVGLRNSLAKATGLPLPTTMVFDYPTP
SEQ ID NO: 172
MSHAKLIQPIYDLLRVNAERLGDKIAYADSRHALTYTELEARTGRLAGHLADLGVERGDRVAILLDNRVETIESYLA
IARASAIAVPLNPAAAGDELAHFLSDSGSVLVITDSAHLDDVRLVAPAVTVVRVDEDPVPPGVRSFAELVAVEPRTQ
ARDDLGLDEAAWMLYTSGTTGTPKGVVSTQGSGLWSAAFCDVPAWELTEEDVLLWPAPLFHSLAHHLCLLATITAGA
TARIMNGFVASEVLNELEKHACTVLVCVPTMYHYLLGAVGEGESRTFSLKLGVVAGSVSPPALIEGFEKAFGAPLLD
TYGCTETTGSLTVNWLNGPRVPGSCGTAVPGVTLRFVDPSTGADVADGEEGELWASAPSVMTGYHGQPEATREVLTD
GWYHTGDLARRSETGHVTITGRIKELIIRGGENIHPQEIEAAVLGLPGVRDAAAAGRPHPVLGDVPALYIVPDADGV
DADAVLAACRERLSYFKVPEEIYRVDAIPRTMSGKVKRTSLTEAPAELLAGASGSDALYRLKWVPAETPGPAATGGH
VIVRVASLRADGTELAGAARDLARSWLSDERRAGATLVFVTGRAVSAGPSDVPVPEHAAVWDAIRDEQTENPGAFVL
IDLEEAETEEPESAAPEAGDPQADTPGADDTRLSTLVALGEPQIALRDSTPLVPRLAPESSTALTTPAARAWVLEPA
RSGTLRELSLVAADTDARPLRPGEVRVDVRAAGLNFRDVLIALGTYPGDGVMGGEAAGVVLEVGPEVNDLSVGDRVF
GLVTDGFGPVTITDRRLLAAMPQDWSFTTAASAAMAFATAHYGLVELAGLKAGESVLIHAATGGVGMAATQIAHHLG
AHIYATASSGKQHLLRAAGIDDDRIANSRTTGFRDAFLDSTGGRGVDVVLNSLSGEFVDSSLDLLAHGGRFIEMSTD
IRDAGRIAAERPGTTYQAFHLVDADPDRLREILTELLALFDQGILDPLPVQAWDIRQAREAFSWMSRARHTGKLVLT
IPQHIDPDGTVLITGGSGGLAGVVARHLVADKGARRLLLLSCDTLDATLAAELTESGARVDTAVCDVSDRAALAQVL
AGVSPEHPLTAIVHAGGAAVADESRQLHHLTKNRDLAAFVVFSQDAPAATEAFAGIRQAEGLPVTTIAWGIPEAEPV
VVGQHLLDRAMASADRAHVAARVNTAGLRALAAANALPPVLKNLVGAETDGTGHQDWSRRFMVAEAARQQELLDLIR
TTVMEILSLPTTARYFPDRTFRENGIDSLTAVELVNSLAKTTGLRLSATMVFDYPTPTALAGRMREL
SEQ ID NO: 173
MSRLDLIRPLSESLCASAASFGDKVAYTDSRRSVTYAELQIRTGRLAGHLAEHGVARGDRVAILLGNRVEIIESYLA
VARASAVAVPLNPDAMDAELAHFLRDSGAVVVITDLAHLEQTRGVAPAMTVVLIGDGRTVPGTSSFAELADTEPASP
ARDDLRLDEPAWMLYTSGTTGTPKGVVSAQRSGLWSAASCDVPAWDLSDEDLLLWPAPLFHSLGHHLCLLAVVAVGA
SARIMSGFAADEVLDALREHPCTVLVGVPTMYRYLLAAVGESGADAPALKMALIAGSVTPASLVEAFERSFGVPLID
TYGCTETTGSVTANRLHGERVPGSCGVPVPGVEIRLVDPVTGADVPLGAEGELWAKTPSVMIGYHGQPEATGEVLVD
GWYRSGDLARRQESGHITITGRVKELIIRSGENIHPREIETVALEVPGVEDAAAAGKPHRVLGEVPVLYVVPAEAGV
DVTAVFAACREQLSYFKVPEEIYQVESIPRTPSGKVKRGLLTEQPAELLAAADGGGSLYRVEWRPAVPPGAGDTGGD
SPVVVRVDSLPADEQELLGAVRDLIHDRIADPRRTTAPLVFVTRHAVLSRNPAHAHAAVWDLVSRAQADNPGLFVLV
DADGDDAPLPSAVGLGEPRVAWRDGGLLVPRLAHPGTEALIAPESGSWLLAETGGGTLRDLALVGTDTADRVLLPGE
VRIAVRAAGLNFRDVTVALGVVSDDRLMGGEAAGVVLDVAPDVTDLEPGDRVFGLVEGAFASVAVTDRRLLGRIPAG
WSFATAASVPVVFSTAYHALTDLVDLRPGEAILIHAAAGGVGMAATQLARHIGAKIYATASPAKQHALLGVDQVANS
RTTEFRGTFLEATGGRGVDVVLNSLAGEHIDASLELLPRGGRFLELGKTDLRDPRHLPAGVSYQVLNRLDSSPDRVR
EILAELLVMFERGVLRPLPVRTWDIREAPEAFSWMSRGRHLGKIVLTIPRDLDPDGTVLVTGASADHMARYLSAERG
HAHVLVSDDPAAVPATHPLTAVVHTGGDEVVSESTRLHQLTRELDLAAFAVFSQSAPASVEALVRHRRTEGLPATAV
SWGLPEAEPAPVQGALLDRTIASVEPAHVVTRVNSAGLRALANSGELPSVLRDVTPALSAKWPRPGTPRPGTPRPGT
PHPAALDQAALLDLVRESLTTVLGLPGVESCAPDRPFRETGLDSLTTIGLANTLSARLGRKLPATMIFDHPTPRTLA
TRLAEEL
SEQ ID NO: 174
MTPAYDVRPLPELLIANAERLGDKPAYTGLHRTVGHAELADRTRRAAGHLAGFAARGDRIALLLGNRVEMVEGYLAV
ARAAAVAVPLNPQASDAELAHFLTDSEAVAVLADAEHTEQVRRVAPGLRLVPIGEWETLATTEPDRPARDDLGLDEV
AWMLYTSGTTGAPKGVLSTQGSGLWSAYHCDVPALGLTDADVLLWPAPLFHSLAHHLAVLAATVSGATVRLLSGFAA
DEVLRELREEGCTLLAGVPTMYHYLLGAAGPDDEVRAPALRGAVVAGAVTPAALITAFGERFGAPLLDTYGCTETTG
SLTINRLDGPRVPGSCGVAVPGVRLRLVDPRTGDDAPEGGEGEIWASGPSLMRGYHRRPDATAEVLADGWYRTGDLA
VRAATGHITITGRVKELIIRGGENIHPREIEAVLAEVPGVADVAVAGRSHAVLGDLPVAYLVTEAGLDPAALFAACR
ERLSSFKVPEEVYRVAAVPRTPSGKIKRRELVAGPAELLATAGGAETLLRTRWTAVDVLDPASLDGWRVVHADQEVD
LGGRLDDDGPAIVVTTRAVRTSADERPSASAAAAWDLVTAAQARRPGRYLLVDTDGVPGGLGAALATGEPQVAVRED
VVLVPRLEAAGETGAPVRLDGTVLVTGEHTERVARHLRARGVTVTDDPAARPLHAVVHVGGTSGLAELAELTGCPER
AAFVVCTEDSRATADALVRAIPGGVAVGVGLPGIEPAALLPELLDRLTADGPYVVARPGSTGLRALATAGRLPAGLG
ALVDTGAAPDPDAAVRRDLVRRLIALPRRARDQALVELVWDAVRATLGAGATPGGPGQAFSEVGFDSLTSVQLRNRL
VAATGVRLSATAVFDFPTPRALADELGRVLI

[0012] In another aspect, the disclosure provides a chimeric polyketide synthase, wherein at least one module of the chimeric polyketide synthase has been modified as compared to a polyketide synthase having the sequence of SEQ ID NO: 175-176.

SEQ ID NO: 175

MSREEFIQPIHDLLRVNAERLGDKIAYADSRRELTHAELRTRTGRIAGHL
VDLAVERGDRVAILLGNRVETIESYLAIARAGAIAVPLNPDATGAEVAHF
LADSGAVLVITDSAHLDDVRRAAAAVTVVLVDEGPLPAGTRSFAELATAE
PPTPARDDLGLDEAAWMLYTSGTTGTPKGVVSTQGSGLWSAANCDVPAWE
LTENDVLLWPAPLFHSLAHHLCLLATTAVGATARIMSGFVAGEVLHELEE
HACTVLVGVPTMYHYLLGAVGEAGPRLPSLKMGLVAGAVSPPALIEGFER
VFGVPLLDTYGCTETTGSLTVNRLSGPRMPGSCGQAVPGISLRFVDPHTG
AEVAEGEEGELWASGPSLMIGYHGRPDATREVLSDGWYRTGDLARRSETG
HVTITGRVKELIIRGGENIHPRDIEAVALELPGVRDAAAAGKQHPVLGEI
PALYLVPDADGVDAEAVLAACREKLSYFKVPEEIYRVDAIPRTLSGKVKR
AALTEAPAELLSAASGNGSLYRLEWVPAETPPAGTGGPVAVHVTRRAVAT
GPADLPDQEQAATWDALRGEQTGPGGPVLIDLDGADIDDARLSALASLGE
PQIVVRDDTPLVARLAREKSPALTIPGERAWVLEPDHSGVLQELALVAAD
TDVRPLRPGEVRIEVRAAGLNFRDVLVALGTDLGDGVFGAEGAGVVLETG
SDVRDLRPGDRVFGLLEGGHGSIAIADRRMLAVIPEGWSFATAASVPEVF
VIAYYGLVDLAGLRAGESVLIHAATGGVGMAATQIARHLGAQVYATAGVG
KQHILRDAGLGDDRIADSRTTDFREAFRDSTQGRGVDVVLNSLKGDFVDA
SLDLLADGGRFLELGQTDIRDAGEIAAERPGTTYHSFTRMNAGPDRLREI
IAELLALFEQGVLRPSPVHTWDIRHAREAFSWMSGGRHTGKMVLTMPQRI
DPGGTVLIAGDSEALARIAARHLGVRHLLLDRGVADAAPDAVVCDVSDHD
ALERVLADLSPEHPLTAVIHTGGAAVTDEIRRLHDLTESLDLTDFVVFSQ
DAPAAVEAFARSRRAHGLPVRTIAWGIPEADPVVADEHLLGRALASAEQA
QIVARVNTAGLRALTAANALPTLLRNLIRAEPEETGQSAWPHRFEAAGAD
REEALLDLIRANVVDILSLPTADRYAPDRTFREMGIDSLTAVGLRNSLAK
ATGLPLPTTMVFDYPTPAVLTARMRELLAGESPAPARTAARAVAQDEPLA
IVGMACRLPGGVSSPDDLWRLVAAGTDAISEFPADRGWDVDNLYDPDPDA
PGKTYTVLGGFLDGVAGFDASFFGISPREALAMDPQQRLMLEVSWEAFEH
AGIPPRSVRGSDAGVFMGAFPSGYDAGLEEFGMTGDAVSVLSGRVSYFFG
LEGPAITVDTACSSSLVALHQASSALRQGECSLALVGGVTVLATPQTFVE
FSRQRGLALDGRSKAFADAADGAGWAEGVGVLVVERLSDARAKGHQIWGV
IRGSAVNQDGASNGLSAPNGPSQQRVIRQALANAGLAPHEVDVVEAHGTG
TTLGDPIEAQAVIATYGQDREQPLLLGSLKSNVGHTQAAAGVSGVIKMVM
ALQHDTVPATLHVDAPSRHVDWTAGAVELVTENRPWPETGRVRRAGVSSF
GISGTNAHVILESAPEQPVSPPEAVAPVVASDRVPLVISAKTPAALAEME
NRLRAYLAAAPGADPRAVASTLATARSVFEHRAVLLGENTITGTVAGADP
RVVFVFPGQGWQQLGMGRALRESSPVFAARMAECAAALSEFVDWDLFTML
DDPAVIDRIDVLQPACWAVMMSLAAVWQAAGVRPDAVIGHSQGEIAAACV
AGALSLRDAARIVALRSQLLAREMVGHGVMAAVALPADDIPLVDGVWIGA
CNGPSSTVISGTPEAVEVVVAACEERGARVRRITAAVASHSPLGEKIRTE
LLGISASIPSRTPVVPWLSTADGIWIEAPLDPAYWWRNLREPVGFGPAVD
LLQARGENVFLEMSASPVLLPAMNDAVTVATLRRDDGTPDRMLTALAEAH
AHGVIVDWPRVFGSTTRVLDLPTYAFEHQRYWAVSADRPSDAGHPMVETV
VPLPASGGVALTGRVSLATHAWLADHAVRGTALLPGTAFVELVTRAATEV
DCPVIDELVIEAPLPLTQTGAVQLSTTVGEADESGRRPVTVFSQADGTDA
WTRHVTATIGRAASLPDPVAWPPAQAEPVDVTGFYDELAAAGYEYGPAFQ
GLRAAWSDGDTVYAEVVLAEEQAHEVDRYAVHPALLDAALQAGMVNTAGT
GQGVRLPFSWNGIQVHSTGATTLRVAATPLADGWSVRAAADNGRPVATIG
SLVTRPVTTDMLGSTTDDLFAVVWTEITAPEPGDPSDVGVFTALPEAGGD
PLTQTRALTAQVLQTVQQWLAGEDRPLVVRTGTDLASAAVSGLVRSAQSE
HPGRLILVESDDELTPEQLAGTAGLDEPRIRIDGGHYEVPRLAREDASLT
VPEDRAWLLELPGSGTLRDLRVIPTDTAERPLRWGEVRVGVRAGGLNFRD
VVVALGMVTDPRPAGGEAAGVVLETGPGVEDLSPGDRVFGILDGGFGSVA
IADRRLLAVIPDGWSFTTAASIPVVFATAYYGLVDLAGLRAGESVLIHAA
TGGVGMAATQIARHLGAEIYGTAGIAKQHVLRDAGLGDDRIADSRTTGFR
ETFRDSTQGRGVDVVLNSLSGDFVDASLDVLAEGGRFIEMGKTDIRDAEQ
ITHATYRAFDLMDAGPDRVREIIAELLGLFEQGVLRPLPVQAWDIRQARD
AFTWMSRARHIGKIVLTIPQQLDPDGTVLISGGSGVLAGILARHLVAERG
VRHLLLVSRSAPSEALISELTALGAQVETVACDVSDRVALEQVLDGVPLT
AVFHTAAALDDGVVESLTPQRVDTVLRPKADAAWYLHELTRDADLAAFVM
YSSVAGIMGAAGQGNYAAANAFLDALAAHRRREGLPALSLAWGLWEDASG
LSAGLTETDHDRIRRGGLEAIAAEHGMRLFDTATRQGEPVLLASPLNLTR
QGEVPALLRTLHRPVARRAATANGRPADLTPEALLKLVCGRAAAVLGHVD
ADAVPVAVAFRDLGVDSLTAVELRNSLAKATGLRLPATLVFDYPTPTVLA
GRLGELLAGGTAPVRAAVVRRAAASDEPLAIVGMACRLPGGVLSPEDLWR
LVESGGDAISGFPVDRGWDVENLFDPDPDAAGRTYAVRGGFLDGAAGFDA
SFFGISPREAQAMDPQQRLVLEVSWEAFERAGIEPGSVRGSDTGVFMGAY
PGGYGVGTDLGGFGMTSVAVSVLAGRVSYFFGLEGPAMTVDTACSSSLVA
LHQAGSALRQGECSLALVGGVTVMPTPQTFVEFSRQRGLAADGRCKAFAD
AADGTGFSEGVGVLLVERLSDAQARGHNILAVVRGSAVNQDGASNGLTAP
NGPSQQRVIRQALANAGLAGAEVDVVEAHGTGTTLGDPIEAQAVIATYGQ
DRDQPVLLGSLKSNLGHTQAAAGVSGVIKMVMALRHDTVPATLHIDEPSR
HIDWTAGAVELVTENQSWPETGRARRAAVSSFGISGTNAHVILESAPAQP
VPLVDTPVSAVTAGVVPLPISARTVPALADLEDRLRAYLTTTPETDLPAV
ASTLAVTRSVFEHRAVLLGEETVTGIAVSDPRVVFVFSGQGSQRVGMGEE
LAAAFPLFARLHRQVWDLLDVPDLEVDDTGYVQPALFALQVALFGLLESW
GVRPEAVIGHSVGEVAAGYVAGVWSLEDACTLVSARARLMQALPAGGAMV
AVPVSEERARAVLVDGVEIAAVNGPASVVLSGDESAVLRVAEGLGRWTRL
SASHAFHSVRMEPMLEEFRQVASELTYREPRIVMAAGEQVTTPEYWVRQV
RDTVRFGDQVAAFGDAVFLEIGPDRTLSRLIDGIPTLHGDDEQHAVVAAL
AELHVQGVPIDWSSILGANPARVLDLPTYAFQHERYWMVSTGRVGGEGHP
LLGWGVPVAEAGGRLYTGRVARQDGPVLSVAAFVEMAFAAAGGRPIRELS
VDALLYIPDDGTAELQTWVSEHRLTIHARYRDTEPWTRLATAALDTTAPA
TTHTPHPGLITTALTLTGDEAPAIWHDLTLHTSNATELHTHITPGDDGTL
TITATDTTGQPVLTAHTATPTTIPVHTPTTPADDLLTLTWTQIPTPGPGD
PTDIAVCTALPDPDGDPLAQTRTLTAQVLQSIQTTLTGEDRPLVVHTGTG
LASAAVSGLVRSAQSEHPDRFILVESDDSLPQAQLAAVAGLDEPWLRITG
SCYEVPRLTKTTTATATAVSEPVWNPDGTVLITGGSGALAGILARHLVTE
RGVRHLLLISRSTPSTTLTDELRELGAHVDVAACDVSDRDALARVLDGVD
LTAVFHTAGALDDGVVESLTPQRLDTVLTPKADGAWHLHELTRDRDLTAF
VMYSSAAGVMGAAGQGNYAAANAFLDALAEHRHADGLPALSLAWGMWDDT
DGMTASLSGTDHRRIRRSGQRAITAEHGMRLLDKASGRSEPVLVATAMNP
IPDTDLPALLRSLYPKTARKSQPIQELSPEALLKIVRDSAALMLGHPNTD
AIAATTAFRDLGVDSLIAVELRNSLAKATGLRLPATLVFDYPTPTVLAGR
LGELLAGVTPQRHATVRTGTASDEPLAIVGMACRLPGGVSSPEDLWRLVE
SGTDAITDFPTDRGWDTDDLFDPDPDTAGKTYTVHGGFLDDVAGFDASFF
GISPREAQAMDPQQRLVLEAAWEAFERAGIEPGSVRGSDTGVFMGAYPGG
YGIGADLGGFGATAGAGSVLSGRLSYFFGLEGPAMTVDTACSSSLVALHQ
AGSALRQGECSLALVGGVTVIANPQIFVEFSRQRGLAADGRCKAFADSAD
GTGWSEGVGVLLVERLSDAQARGHNILAVVRGSAVNQDGASNGLTAPNGP
SQQRVIRQALANAGLAGAEVDVVEAHGTGTTLGDPIEAQAVIATYGQDRD
QSVLLGSLKSNLGHTQAAAGVSGVIKMVMALQNGVVPRTLHADQPSRHID
WTAGAVELVTENQPWPELDRPRRAAVSAFGVSGTNAHVILESAPDQPVPL
VDTPVSAVTAGVVPLPISARTVPALADLEDQLRAYLTTAPETDLPAVAST
LATTRSVFEHRAVLLGEDTVTGTAIPDPRIVFVFSGQGSQRAGMGEELAA
AFPLFARLHRQVWDLLDVPDLDVDDTGYVQPALFALQVALFGLLESWGVR
PRAVIGHSVGEVAAGYVAGVWSLEDACALVSARARLMQALPAGGAMVAVP
VSEERARAVLVDGVEIAAVNGPASVVLSGDEAAVLRVAEGLGRWTRLSAS
HAFHSVRMEPMLEEFRQVVSRLTYREPRIVMAAGEQVTTPEYWVRQVRET
VRFGDQVAAFGDAVFLEIGPDRTLSRLIDGIAMLDGDDEVRAAVAALAMM
HVQGVGVDWPAILGTTTGRVLDLPTYAFQHERYWMANADEGHPLLGKVEH
PLLGSVMALPNSDGVVLTGRISLATHAWLADHVVRGTVLLPGTGFVEMVA
RAAAEVGCGVIDELLIEAPLLLPEHGGVHLSVSVGEADGAGRRPVTVFAQ
ADDAEVWVRQVTATISPAGPAVSLPELEVWPPVQAEPVDVSTFYERLARA
DWQWGPAFQGLRAAWRDGDTIYAEIVLADEEAREADQFLVHPALLDAALQ
TSVLKTPDDLRLPFSWNQIEFHATGAAILRVAVTPVADRWIVHAADSTGR
PVATIGALVSRPVTAETLGSNTDDLFALTWTEIPTPGPGDPADVAVCTAL
PEPDSDPLTQTRTLTAQVLQSIQTSLTGEDRPLVVHTGTGLASAAVSGLV
RSAQSEHPDRFILVECDDETLTPDQLAATAGLDEPWLRITGGHYEVPRLT
KTTTAAATTVSEPVWDPDGTVLITGGSGALAGILARHLVTERSVRHLLLI
SRSTPSTTLINELRELGAHIETAACDVSDRDALARVLDGVDLTAVFHTAG
ALDDGVVESLTPQRLDTVLMPKADAAWHLHELTRDRDLAAFVMYSSAAGV
MGAAGQGNYAAANAFLDALAEHRRADGLPALSLAWGMWDDADGMTASLSG
TDHRRIRRSGQRAITAEHGMRLLDKASGRSEPVLVATAMNPAGEGEVPAL
LRTLHRPVARRAATTNGRPADLTPEALLKVVRDSAAVVLGHASADTVPAA
TAFQELGLDSLIAVELRNSLAKATGLRLPATMVFDYPTPAALAGRLGELL
AGETTPATAAVVRRATASDEPLAIVGMACRLPGGVSSPEDLWRLVESGFD
AITGFPTDRGWDVDNLYDPDPDAPGKSTTLHGGFLDDVAGFDASFFGISP
REAVAMDPQQRLAMEVSWEAFERAGIEPGSVRGSDTGVFMGAYPGGYGIG
AELGGFMLTGRAGSVLAGRVSYFFGLEGPAMTVDTACSSSLVALHQAAYA
LRQGECSLALVGGVTVMPTPVMFVEFSQQQNLADDGRCKAFADSADGTGW
SEGVGVLLVERLSDAQARGHNILAVVRGSAVNQDGASNGLTAPNGPSQQR
VIRSALTSAGLTTADVDVVEAHGTGTTLGDPIEAQAVLATYGQDRDQPVL
LGSLKSNLGHTQAAAGVSGVIKMVMALQNGVVPRTLHVEEPSRHVDWTAG
AVELVTENQSWPETGRARRAAVSSFGFSGTNAHVILESAPAQPVPPMDTP
APAVTTGVVPLPISAKSLPALADLEDQLRAYLTATPETDLPAVASTLAMT
RSVFEHRAVLLGEETVTGTAIPDPRIVFVFSGQGSQRVGMGEELAAAFPL
FARLHRQVWDLLDVPDLDVDDTGYVQPALFALQVALFGLLESWGVRPRAV
IGHSVGEVAAGYVAGVWSLEDACALVSARARLMQALPAGGAMVAVPVSEE
RARVALVDGVEIAAVNGPASVVLSGDEAAVLQIAEGLGRWTRLSASHAFH
SVRMEPMLEEFGQVASELTYQEPRIVMAAGEQVTTPEYWVRQVRDTVRFG
DQVAAFGDAVFLEIGPDRTLSRLIDGIAMLDGDDEVRAAVAALAELHVQG
VPIDWPAVLGTTTGRVLDLPTYAFQHQRYWAASTDRPAGDGHPLLDTVVA
LPGADGVVLTGRISLATHAWLADHAVRGTVLLPGTGFVEMVARAAAEVGC
AVVDELVIEAPLLLPASGGVQLSVSVGEADDAGHRPVTVHSQADETEAWV
RHVTATISPSGPIVSPPEFEVWPPAQAEPVEVARFYDELAAAGYEYGAAF
QGLRAAWRAGETIYAEVVLAEDQTLEAARFTVHPALLDAALQANILNASG
DLRLPFSWGQVQFHTTGAATLRVAVTPVADGWTIQATDDAGRPVATVGSV
VARPVAGLGATAEDLFALTWNEIPAPGQGGRTVGRFEDLADDGPVPELVV
FTALPDVDADPLVRTRALTARVLEAIQRWLGEPRFADSTLVVRTGTDLAS
AAVSGLVRSAQSEHPDRFILVEGDSSPVEIGLDEPWLRVDGGRYEVPRLI
RLSAEPVQEAAWNPDGMVLITGGTGALAGILARHLVAENKARRLLLVSRS
VPDDALISELTELGAEVGTAVCDVSDRAALARVLAGVPSLTAVIHTAGVL
DDGVMESLTPQRLDTVLRAKADGAWHLHELTRDRDLAAFVMYSSAAGLMG
SPGQGNYAAANAFLDALAVERRAEGLPALSLAWGFWEETTGLTANLTGAD
RDRIRRGGLQTITAERGMRMFDTATQHGEPVLLAAPISPVRDGEVPALLR
SLHRRGTRRGTTADASAQWLAGLAPEEREGALIKVVRDTAAVVLGHADAG
TIPVTAAFKDLGLDSLTAVELRNSLAKSTGLRLPATMVFDYPTPASLAAR
LDDLMNPRVSSTALLAELDRIEGMFDSVTFDEKQASLVKDRLSAALGKWQ
QISRSADVATVALANADAGEILDFIDREFGNPTI

SEQ ID NO: 176

MPDHDKLVEYLRWATAELHTTRAKLQAATEAGTQPLAIVGMACRLPGGVS
SPEDLWRLVESGTDAISGFPVDRGWDVDGLYDPDPDVPGKSYTVEGGFLD
AVTGFDAPFFGISPREALAMDPQQRLVLEASWEAFERAGIEPGSVRGSDT
GVFMGAFPGGYGTGADLGGFGMTGGAASVLSGRVSYFFGLEGPAMTVDTV
CSSSLVALHQAGYALRHGECSLALVGGVTVMSTPQTFVEFSRQRGLAADG
RCKAFADNADGTGWSEGVGVLLVERLSDAQARGHNILAVVRGSAVNQDGA
SNGLTAPNGPSQQRVIRQALANAGLTGADVDVVEAHGTGTTLGDPIEAQA
VIATYGRDRDQPVLLGSLKSNLGHTQAAAGVSGVIKMVMALQNGVVPRTL
HIEEPSRHVDWTAGAVQLVTENRPWPELGRARRAAVSSFGLSGTNAHVIL
ESAPDQPPAPTTDTPVSAVTAGVVPLPISAKTVPALADLEDRLRTYLTTT
PDTDLPAVASTLATTRSLFEHRAVLLGEDTVTGTAIPDPRVVFVFPGQGW
QWQGMGSALLTSSTVFAERMAECAAALSEFVDWDLLTVLDDPSVVDRVDV
VQPACWAVMISLAAVWQAAGIHPDIVLGHSQGEIAAACLAGAISLPDAAR
IVAQRSQLIAHQLTGHGAMASISLPADDIPTTDKVWIAAHNGTSTVIAGD
PQAVEAVLATCETRGARVRKINVDYASHTPHVEQIRTELLDITTGIEAHT
PAVPWLSTTDNTWIDQPLDPTYWYRNLREPVRFGPAIDLLQTQDNNLFIE
ISASPVLLQTMDNAATVATLRRDEDTTQRLLTAFAEAHVHGATIDWPTVL
DTTTTPVLDLPTYPFQRQRYWATSNGRSTGQGHPLLETVVALPGTDGVAL
TGRISLATHPWLTDHTVRGTVLLPGTAFVELVTRAATEVNCQIIDELIIE
APLPLPQTDGVQLSVTVGEADEAGHRPVTVYSQTDESDDWIQHVTATIGP
GASLPETAAWPPAHAEPVNVTGLYDNLAAAGYEYGPAFQGLQAAWRAGDT
VYAEVTLAEEQAQETARFTMHPALLDAALHTIALHDTGDLHLPFSWTRVQ
FHGTGAATLRVAVTPAADGWNIRATDDTGRAVATIGSLVTRPMAAETTDD
LLALTWTEIPAPEPVDPTDVVVFTALPDTVEDVPAQTRALTTRVLHTIQE
WLADDDRTLIVRTGTDLASAAVSGLVRSAQSEHPGRFILVESADEALTQE
QLAATAGLDEPRLRITGGRYEVPRLTREDTALAVPTDRAWLLEQPRSGSL
EDLALLPTDAAERPLQAGEVRIGVRAAGMNFRDVVVALGMVTDTRLAGGE
AAGVVLEVGTDVNDFRPGDRVFGILEGGFGSVAICDHRTLAVIPDGWSFT
TAASVPIAFATAYYGLVDLAGLRAGESVLIHAATGGVGIAATQIARHLGA
EIYGTASVGKQHVLRDAGLADDRIADSRTTDFRDTFRDGTQGRGVDVVLN
SLRGEFIDASLDLLVDGGRFIEMGKTDIRDAAQIPDATYHAFDLMDAGHD
RLREIMTELLALFEQGVLHPMPVHAFDIRQAREAFSWMSRARHIGKLVLT
IPQPIDPDGTVLITGGSGVLAGIVARYLVTENRARHLLLLSRSAPSASLI
DELTALGAHVDVAACDVADRAALAEILDGVDLTAVIHTAGALDDGVVESL
TPQRLDTVLTPKADGAWHLHELTRDRDLAAFIVYSSAAGVLGAAGQGNYA
AANAFLDALAVHRRLEGLPGLSLAWGLWEDASGLTADLTDADRDRIRRSG
QRAITAAYGMRMLDAATRQSEAILLAAPISPIQDGDVPAILRSLHRRVGR
RASVAHGHPADLTPEALLKVVRDSAAMVLGHTNADTVPTATAFQELGLDS
LTAVELRNSLTKATGLRLPATMAFDYPTPDALAARLGELLAGEAAPKAAA
AVRRATASDEPLAIVGMACRLPGGVSSPEDLWRLVESGTDAITDFPTDRG
WDTDTLFDPDPDTPGKTYTVHGGFLNDVAGFDAPFFGISPREAVAMDPQQ
RLVLESSWEAFERAGIQPDSIRGSDTGVFMGAYPDGYGIGADLAGFGVTA
GAGSVLSGRVSYFFGLEGPAMTVDTACSSSLVALHQAAYALRQGECSLAL
VGGVTVMPSPRTFIEFSRQRGLAADGRSKAFADAADGTGFSEGVGVLLVE
RLSDAQAKGHNILALVRSSAVNQDGASNGLTAPNGPSQQRVIQSALAGAG
LTSADVDVVEAHGTGTTLGDPIEAQAVLATYGQDRDQPVLLGSLKSNLGH
TQAAAGVSGVIKMVMALQHNTVPATLHVDAPSRHVDWTAGAVRLATENQP
WPETNRPRRAGVSSFGVSGTNAHVILEQAPAASPVEPVDTTDVVIPLVVS
ARSSGSLSDQADRLAALVGSPDAPALTSLADALLTRRTVFSQRAVVVAGS
HEQAAAGLRALASGDSHPALVTGAAGPARGVVLVFPGQGSQWAGMGAELL
DTSPVFAARIAECAEALRPWVDWSLDEVLRGDASADVLGRVDVVQPASFA
VMVGLAAVWESAGVRPDAVLGHSQGEIAAAYVAGALSLTDAAKIVAVRSR
LIAARLAGRGGMASVALAPDEAAAKLGRTELAAVNGPASVVIAGDAEALD
ETLAMLEGEAVRVRRVAVDYASHTPHVEELEQSMAEALADVRSRQPRVGF
LSTVTGDWVTEAGALDGGYWYRNLRQPVRFGPAVASLAEAGYTVFVEASA
HPVLVQPVAETLDRTDAVVTGTLRRQDGGLPRLLTSMAELFVGGVPVNWP
VLLPAGAVRGWVDLPTYAFDHQRYWLENRVATDAAALGLAGADHPLLGAI
VAVPQSGGVAMTSRLSPRNHPWLAEHTLGGVPTVPTSVLVELAVRAGDEV
GCGVVEELTVDAPLLLPERGGVRVQVIVGATDANGQRGLDIFSAPEDTGQ
EAWTRHATGTLAPGGDIAADVDLSAWPPANAQPVDVTDGYDLLERAGYGY
GPAFQGVRAIWRRGEELFAEVALEPELTDTAARFGLHPALLDAAWHPELR
DEVAETSPDGRRWWSQPSRWAGLRLHTAGATVLRVRLAPVDADSMSLQAA
DETGDPVLTVDSLSLCAVSADQLTTAESSDDALFRLEWTPLSKAPTAARS
WVPVETGADVAALDGQAVVDAVMLEAAGTGDALELTCRVLEVVQAWLTLP
GWDESRLVVVTRGAVGAVGDPAGSAVWGLVRAAQAENPDRIALLDLDGGR
PVEPLLAESEPQLAIRGAEALVPRLIRAAAATDAPALFDESQTVLITGGT
GSLGGLLARHLVGRYGLRRLVLVSRRGPDAPGAYELAAELAAHGAEAALV
ACDLTDRDAVARLLTEHHPTAVVHAAGVSDDGVIGTLTSDRLAYVFGPKA
TAARHLDELTRELLPDLAAFVTYSSISAVFLGAGSGGYAAANAYLDGLMA
RRHAEGLPGLSLAWGLWDQEADGGGMAAGLQDITRNRMRRRGGVLSFTPA
EGMALFDAAMATDEALVVPVRLDLPALRAEAVAEGRSAPVLLRGLVRPGR
RLARTVSGGTGVLADLTPEALLKLVRGRAAAVLGHVDADAVPVAAAFKDL
GVDSLTAVELRNSLAKATGLRLPATLVFDYPTPTVLAGRLGELLAGGTAP
VRAAVVRRAAASDEPLAIVGMACRLPGGVLSPEDLWRLVESGGDAISGFP
VDRGWDVENLFDPDPDAAGRTYAVRGGFLDGAAGFDASFFGISPREAQAM
DPQQRLVLEVSWEAFERAGIEPGSVRGSDTGVFMGAYPGGYGMGTDLGGF
GMTSVAVSVLAGRVSYFFGLEGPAMTVDTACSSSLVALHQAGSALRQGEC
SLALVGGVTVMPTPQTFVEFSRQRGLAADGRCKAFADAADGTGFSEGVGV
LLVERLSDAQARGHNILAVVRGSAVNQDGASNGLTAPNGPAQQRVIQSAL
AGAGLASADVDVVEAHGTGTTLGDPIEAQAVIATYGQDRDQPVLLGSLKS
NLGHTQAAAGVSGVIKMVMALQNGVVPRTLHIDEPSRHIDWTAGAVELVT
ENQSWPETGRARRAAVSSFGISGTNAHVILESAPAQPVPLVDTPVSDVTA
GVVPLPISARTVPALADLEDQLRAYLTTAPETDLPAVASTLAMTRSVFEH
RAVLLGEETVTGIAVSDPRVVFVFSGQGSQRVGMGEELAAAFPLFARLHR
QVWDLLDVPDLEVDDTGYVQPALFALQVALFGLLESWGVRPRAVIGHSVG
EVAAGYVAGVWSLEDACTLVSARARLMQALPAGGAMVAVPVSEERARAVL
VDGVEIAAVNGPASVVLSGDESAVLRVAEGLGRWTRLSASHAFHSVRMEP
MLEEFRQVASELTYREPRIVMAAGEQVTTPEYWVRQVRDTVRFGDQVAAF
GDAVFLEIGPDRTLSRLIDGIAMLDGDDEVRAAVAALAMMHVQGVGVDWP
AVLGTTTGRVLDLPTYAFQHERYWMVSTGRPGGEGHPLLGWGVPVAEADG
RLYTGRVARQDGPVLPVAAFVEMAFAAAGGRPIRELSVDALLYIPDDGTA
ELQTWVSEHRLTIHARYRDTEPWTRLATATLDTTEPATTHTPHPGLITTA
LTLTGDEAPAIWHDLTLHTSNATELHTHITPGDDGTLTITATDATGQPVL
TAHAATPTTIPVHTPTTPADDLLTLTWTQIPTPGPGDGADIAVCTALPDP
DSDPLAQTRTLTAQVLHSIQASLTGEDRPLVVHTGTGLASAAVSGLVRSA
QSEHPDRFILVESDETLTPDQLAAVAGLDEPWLRITDGRYEVPRLTKTTT
TATATAVSEPVWDPDGTVLITGGSGALAGILARHLVTERGVRHLLLVSRS
TPSTTLIDELRELGAHVDVAACDVSDRAALARVLDGVDLTAVFHTAGALD
DGVVESLTPQRVDAVLRPKADGAWHLHELTRDRDLTAFVMYSSAAGVMGA
AGQGNYAAANAFLDALAEHRRADGLPALSLAWGMWDDADGMTASLSGTDH
RRIRRSGQRAITAEHGMRLLDKASGRSEPVLVATAMNPIPDTDLPALLRS
LYPKTARKSQPIQELSPEALLKIVRDSAAMVLGHANADTVPTATALQELG
LDSLTAVELRNSLTKATGLRLPATMAFDYPTPAALAGRLGELLAGDTTPA
TAAVVRRATASDEPLAIVGMACRLPGGVSTPEDLWRLVESGTDAITDFPT
DRGWDTDDLFDPDPDTPGKTYTVHGGFLDDVAGFDASFFGISPREALAMD
SQQRLVLEAAWEAFERAGIEPGSVRGSDTGVFMGAYPDGYGIGADLGGFG
ATAGAGSVLSGRLSYFFGLEGPAMTVDTACSSSLVALHQAGSALRQGECS
LALVGGVTVIANPQIFVEFSRQRGLAADGRCKAFADNADGTGFSEGVGVL
LVERLSDAQAKGHNILALVRSSAVNQDGASNGLTAPNGPSQQRVIRQALA
NAGLTGAEVDVVEAHGTGTTLGDPIEAQAVLATYGQDRDQPVLLGSLKSN
LGHTQAAAGVSGVIKMVMALRHDTVPATLHIDEPSRHIDWTAGAVELVTE
NQPWPVLGRPRRAAVSAFGVSGTNAHVILESAPDQPPAPATDTPAPAATA
GVVPLPISAKTVPALADLEDRLRTYLTTTPETDLPAVASTLATTRSLFEH
RAVLLGEDTVTGTTIPDPRIVFVFPGQGWQWQGMGSALLTSSTVFAERMA
ECAAALSEFVDWDLLTVLDDPSIVDRVDVVQPACWAVMISLAAVWQAAGI
HPDIVLGHSQGEIAAACLAGAISLPDAARIVAQRSQLIAHQLTGHGAMAS
ISLPADDIPTTDKVWIAAHNGTSTVIAGDPQALDTVLATCETHGARVRKI
NVDYASHTPHVEQIRTELLDITTDIEAHTPTVPWLSTTDNTWIDQPLDPT
YWYRNLREPVRFGPAIDLLQTQDNNLFIEISASPVLLQTMDNATTVATLR
RDEDTTQRLLTAFAEAHVHGATIDWPTVLDTTTTPVLDLPTYPFQRQRYW
ATSNGRPTSQGHPLLETVVALPGTHGVALTGRISLATHPWLTDHTVRGTV
LLPGTAFVELVTHAATEVNCQVIDELIIEAPLPLPQNGGVQLSVTVGEAD
EAGHRPVTVYSQTDESDDWVQHVTATIAPGVSSSESAAWPPAQAEPVNVT
GLYDNLAAAGYEYGPAFQGLQTAWRDGSTVYAEVTLAEEQAQETARFTMH
PALLDAALHTIALHDTADLQLPFSWRQVQFHGSGAATLRVAVTPAADGWN
IRATDDTGQTVATIGSLVTRPMAAETTNDLLALTWTEIPAPEPVDPADVV
VFTALPEPGSDPLAQTRALTTRVLHTIQEWLADDDRTLIVRTGTDLASAA
VSGLVRSAQSEHPGRFILVESDDETLTHEQLAATAGLDEPRLRITDGRYE
VPRLTREDTALAVPEGGAWMLDQPSRSGTLQDLRLVPTDAAERPLRPGEV
RVGVRAAGLNFRDVAVALGMVTDTRLIGGEGAGVVLEAGPGVEDLRPGDR
VFGLLEGGFGPVAVADRRALALIPDGWSFTTAASVPIAFATAYYGLLDLA
GLRAGESVLIHAATGGVGMAATQIARHLGADVYATASTGKQHVLRDAGLS
DDRIADSRTTGFRETFRDSTDGRGVDVVLNSLKGDFVDASLDLLVDGGRF
IEMGKTDIRDAAQIPDATYRAFDLMDAGPERLREIITELLALFEQGVLRP
LPVHAFDIRQARDAFGWMSRARHIGKLVLTIPQPIDPDGTVLITGGSGVL
AGIVARHLVIAEGLRNLLLLSRSAPSEALIGELTALGAQVETAACDIADR
AALARVLDGVPLTAVIHTAGALDDGVVESLDPQRLDSVLTPKADGAWHLH
ELTRDRDLAAFIMYSSAAGVLGAAGQGNYAAANAFVDALAVHRRFMGLPA
LSLAWGLWDDTSALTAGLTDSDHDRIRRSGARTITAEHGMRMFDAATRQS
EAVLLAAPMGPIRGEDVPALLRGLATVRQPRTRAKRDMGPERLRDRLNGR
TSVEQHRIMVELVLAHATSVLGHESPDAIAPDRAFKDLGMDSLTAIELRN
HLVAETGVRLPATTAFDHPTADDLAKRLLAEVGLTPAPQRTEADIREEVV
VREPAGDDSWTSEPIAIVSMSCRAPGGVDSPESLWRLVESGTDAITDFPG
DRGWDVAGLYSPDPDTGYKTYCVQGGFLDAAADFDAAFFGISPREALGMD
PQQRLLLETSWEAIERARIDPRSLRGRNVGVYVGGAAQGYGVGAIDQQRD
NVITGSSISLLSGRLSYALGLEGPGVTVDTACSSSLVALHLACQALRQRE
CSMALVSGVSVIPTPDVFVEFSRQRGLAADGRCKSFSASADGTIWAEGVG
VLVLERLSEATRLGHRVLAVVRGSAVNSDGASNGLTAPNGVSQQRVIRQA
LTGAGLTAADVDVVEAHGTGTKLGDPIEAEAILATYGQDRSTPVCLGSLK
SNIGHAMAASGVLAVIKMVEAMRHGLIPRTLHVEEPSPHVDWASGDVALL
TENQPWPDDAKLRRAGVSSFGLSGTNAHVVLEQYRAPAAPDITTTEHEPL
AWTLSARDPKALREQAGRLHAALTESPQWRPLDIGYSLATTRSNFAHRAV
AVGSDREDLLRALSKLADGSAWPALVTATAKDRRVAYLFDGQGSQRPDMG
SGLYERFPAFARAWDRISAEFGKHLDHSLTDVYLGRGDAATADLVDDTLY
AQAGLFTMEIALFELLAEWGVRPDFVSGHSIGETAAAYAAGVLSLEDVTT
LIVARGRALRQVPPGAMVALRAGEDEAREFLGRTGAALDLAAVNSPTSVV
VSGASEAVAGFRARWTESGREARTLNVRHAFHSRHVEAVLGEFREVLESL
TFRTPALPVVSTVTGRLIEPTELSTSEYWLRQVRQTVRFHDAVRELSGQG
VGTFVEIGPSGALASAGLECLGDEASFHAVQRPGSPGDVCLMTAVAELHA
GGTTVDWATVLAGGRATDLPVYPFQHGSYWLAPVTRAADGAPSAGVPAPG
EYARPSAPEEPRTMLELVRLEAAIALSITDPGLIADDSSFLDLGFDSISA
LRLSNRLAAVTGLDLPPSLLFDHPTPAELAARLDELSAADLDGAGVYALL
EEIDELDDEDLDMTEEEQTAISELLTKLSAKWSR

[0013] In some embodiments, the disclosure provides a chimeric polyketide synthase where at least one module includes a portion having at least 90% identity to any one of SEQ ID NO: 1-174.

[0014] In another aspect, the disclosure provides a nucleic acid encoding any one of the above described polyketide synthases.

[0015] In some embodiments of any of the above described aspects, the nucleic acid encoding any one of the above described polyketide synthases further encodes an LAL in which the sequence encoding the LAL is operatively linked to the sequence encoding the polyketide synthase.

[0016] In some embodiments, the LAL may be a heterologous LAL.

[0017] In some embodiments, the LAL may include a portion having at least 80% (e.g., at least 80%, at least 85%, at least 90%, at least 95%, at least 99%) sequence identity to SEQ ID NO: 177. In some embodiments, the LAL may include a portion having the sequence of SEQ ID NO: 177. In some embodiments, the disclosure provides a nucleic in which the LAL has the sequence of SEQ ID NO: 177. In some embodiments, the LAL lacks a TTA inhibitory codon in an open reading frame.

SEQ ID NO 177:
MPAVESYELDARDDELRRLEEAVGQAGNGRGVVVTITGPIACGKTELLDA
AAAKSDAITLRAVCSEEERALPYALIGQLIDNPAVASQLPDPVSMALPGE
HLSPEAENRLRGDLTRTLLALAAERPVLIGIDDMHHADTASLNCLLHLAR
RVGPARIAMVLTELRRLTPAHSQFHAELLSLGHHREIALRPLGPKHIAEL
ARAGLGPDVDEDVLTGLYRATGGNLNLGHGLIKDVREAWATGGTGINAGR
AYRLAYLGSLYRCGPVPLRVARVAAVLGQSANTTLVRWISGLNADAVGEA
TEILTEGGLLHDLRFPHPAARSVVLNDLSARERRRLHRSALEVLDDVPVE
VVAHHQAGAGFIHGPKAAEIFAKAGQELHVRGELDAASDYLQLAHHASDD
AVTRAALRVEAVAIERRRNPLASSRHLDELTVAARAGLLSLEHAALMIRW
LALGGRSGEAAEVLAAQRPRAVTDQDRAHLRAAEVSLALVSPGASGVSPG
ASGPDRRPRPLPPDELANLPKAARLCAIADNAVISALHGRPELASAEAEN
VLKQADSAADGATALSALTALLYAENTDTAQLWADKLVSETGASNEEEGA
GYAGPRAETALRRGDLAAAVEAGSAILDHRRGSLLGITAALPLSSAVAAA
IRLGETERAEKWLAEPLPEAIRDSLFGLHLLSARGQYCLATGRHESAYTA
FRTCGERMRNWGVDVPGLSLWRVDAAEALLHGRDRDEGRRLIDEQLTHAM
GPRSRALTLRVQAAYSPQAQRVDLLEEAADLLLSCNDQYERARVLADLSE
AFSALRHHSRARGLLRQARHLAAQCGATPLLRRLGAKPGGPGWLEESGLP
QRIKSLTDAERRVASLAAGGQTNRVIADQLFVTASTVEQHLTNVFRKLGV
KGRQHLPAELANAE

[0018] In some embodiments of any of the foregoing nucleic acids, the nucleic acid includes an LAL binding site, in which the sequence encoding the LAL binding site is operatively linked to the sequence encoding the polyketide synthase.

[0019] In some embodiments, the LAL binding site includes a portion having at least 80% (e.g., at least 80%, at least 85%, at least 90%, at least 95%, at least 99%) sequence identity to the sequence of SEQ ID NO: 178 (CTAGGGGGTTGC). In some embodiments, the LAL binding site includes a portion having the sequence of SEQ ID NO: 178 (CTAGGGGGTTGC). In some embodiments, the LAL binding site has of the sequence of SEQ ID NO: 178 (CTAGGGGGTTGC). In some embodiments of the above described aspect, the LAL binding site has the sequence of SEQ ID NO: 179 (GGGGGT).

[0020] In some embodiments of any of the foregoing nucleic acids, the binding of an LAL to the LAL binding site promotes expression of the polyketide synthase.

[0021] In some embodiments of any of the foregoing nucleic acids, the nucleic acid encoding any one of the above described polyketide synthases, further encodes a nonribosomal peptide synthase.

[0022] In some embodiments of any of the foregoing nucleic acids, the nucleic acid encoding any one of the above described polyketide synthases further encodes a P450 enzyme.

[0023] In some embodiments of any of the foregoing nucleic acids, the nucleic acid encoding any one of the above described polyketides and a first P450 enzyme, further encodes a second P450 enzyme.

[0024] In another aspect, the disclosure provides an expression vector including any of the foregoing nucleic acids. In some embodiments, the expression vector may be an artificial chromosome, e.g., a bacterial artificial chromosome.

[0025] In another aspect, the disclosure provides a host cell including any of the above described expression vectors.

[0026] In another aspect, the disclosure provides a host cell including any of the foregoing polyketide synthases, in which the polyketide synthase is heterologous to the host cell.

[0027] In some embodiments of any of the foregoing host cells, the host cell naturally lacks an LAL and/or an LAL binding site.

[0028] In some embodiments of any of the foregoing host cells, the host cell includes an LAL capable of binding to an LAL binding site and regulating expression of a polyketide synthase. In some embodiments, the LAL and/or LAL binding site may be heterologous to the cell. In some embodiments, the host cell includes an LAL with a portion having at least 80% (e.g., at least 80%, at least 85%, at least 90%, at least 95%, at least 99%) sequence identity to the sequence of SEQ ID NO: 177.

[0029] In some embodiments of any of the foregoing host cells, t he host cell is a bacterium, e.g., an actinobacterium, such as an actinobacterium selected from the group consisting of Streptomyces ambofaciens, Streptomyces hygroscopicus, or Streptomyces malayensis. In some embodiments in which the host cells is an actinobacterium, the actinobacterium is S1391, S1496, or S2441.

[0030] In some embodiments of any of the foregoing host cells, the host cell has been modified to enhance expression of a polyketide synthase. For example, the host cell has been modified to enhance expression of a compound-producing protein by (i) deletion of an endogenous gene cluster which expresses a compound-producing protein; (ii) insertion of a heterologous gene cluster which expresses a compound-producing protein; (iii) exposure of the host cell to an antibiotic challenge; and/or (iv) introduction of a heterologous promoter that results in an at least 2-fold increase in expression of a compound compared to the homologous promoter.

[0031] In another aspect, the disclosure provides a method of producing a polyketide by culturing any of the foregoing host cells under suitable conditions.

[0032] In another aspect, the disclosure provides a method of producing a polyketide by culturing a host cell engineered to express any of the foregoing polyketide synthases under conditions suitable for the polyketide synthase to produce a polyketide.

[0033] In another aspect, the disclosure provides a method of producing a compound, the method including: (a) providing a parent polyketide synthase sequence capable of producing a compound; (b) determining the compatibility of at least one module of a second polyketide synthase with at least two modules of the parent polyketide synthase; (c) producing a nucleic acid encoding a modified polyketide synthase, wherein the modified polyketide synthase includes at least one module of a second polyketide synthase which has been determined to be compatible with the at least two modules of the parent polyketide synthase.

[0034] In another aspect, the disclosure provides a method of producing a compound, the method including: (a) providing a parent nucleic acid encoding a parent polyketide synthase; (b) modifying the parent nucleic acid to create a modified nucleic acid encoding a modified polyketide synthase capable of producing a compound, wherein the modification produces a modified polyketide synthase including at least one heterologous module.

[0035] In another aspect, the disclosure provides a method of producing a compound, the method including: (a) providing a parent polynucleotide sequence capable of producing a compound; (b) identifying one or more heterologous modules suitable for replacement of one or more modules in the parent polynucleotide sequence; (c) producing a nucleic acid encoding a modified polyketide synthase, wherein the modified polyketide synthase includes at least one heterologous module identified in step (b).

[0036] In another aspect, the disclosure provides a method of producing a plurality of engineered polyketide synthases, wherein each of the plurality of polynucleotides corresponds to an engineered polyketide synthase, and wherein each of the plurality of polynucleotides includes one or more heterologous modules with altered enzymatic activity relative to a reference polyketide. The method includes the steps of: (a) providing a parent polynucleotide sequence encoding a polyketide synthase; (b) identifying one or more modules for replacement in the parent polynucleotide sequence; (c) identifying two or more heterologous modules suitable for replacement for each of the modules identified in step (b); (d) generating a plurality of polynucleotides, wherein each of the plurality of polynucleotides corresponds to an engineered polyketide synthase, and wherein each of the plurality of polynucleotides includes a heterologous module selected from the two or more heterologous modules identified in step (c) in replacement of each of the one or more modules to be replaced identified in step (b).

### Definitions

[0037] A “polyketide synthase” refers to an enzyme belonging to the family of multi-domain enzymes capable of producing a polyketide. A polyketide synthase may be expressed naturally in bacteria, fungi, plants, or animals.

[0038] As used herein, the term “engineered polyketide synthase” is used to describe a non-natural polyketide synthase whose design and/or production involves action of the hand of man. For example, in some embodiments, an “engineered” polyketide synthase is prepared by production of a non-natural polynucleotide which encodes the polyketide synthase.

[0039] A cell that is “engineered to contain” and/or “engineered to express” refers to a cell that has been modified to contain and/or express a protein that does not naturally occur in the cell. A cell may be engineered to contain a protein, e.g., by introducing a nucleic acid encoding the protein by introduction of a vector including the nucleic acid.

[0040] The term “gene cluster that produces a small molecule” or “gene cluster that produces a compound,” as used herein, refers to a cluster of genes which encodes one or more compound-producing proteins.

[0041] The term “heterologous,” as used herein, refers to a relationship between two or more proteins, nucleic acids, compounds, and/or cell that is not present in nature. For example, the LAL having the sequence of SEQ ID NO: 177 is naturally occurring in the S18 Streptomyces strain and is thus homologous to that strain and would thus be heterologous to the S12 Streptomyces strain.

[0042] The terms “homologous” or “native,” as used interchangeably herein, refer to a relationship between two or more proteins, nucleic acids, compounds, and/or cells that is present naturally. For example, the LAL having the sequence of SEQ ID NO: 177 is naturally occurring in the S18 Streptomyces strain and is thus homologous to that strain.

[0043] The term “recombinant,” as used herein, refers to a protein that is produced using synthetic methods.

[0044] As used herein, the term “reference polyketide synthase” refers to a polyketide synthase that has a sequence having at least 80% identity (e.g., at least 80% identity, at least 85% identity, at least 90% identity, at least 95% identity, at least 99% identity, or 100% identity) to the sequence of an engineered polyketide synthase except to the sequence of the one or more modules which are modified.

[0045] As used here, the term “compatibility” refers to a measure of the likelihood of two adjacent modules to form a competent module-module junction, in which polyketide translocation is not substantially inhibited. A heterologous module may be considered compatible if it meets at least one of the following criteria: 1) the module is present in the same module clade as one or more adjacent modules of the reference PKS, as determined by the module-level phylogeny classification described in the detailed description of the invention; 2) the module is assigned a score of greater than or equal to 0.90 in the inter-module covariation analysis algorithm described in the detailed description of the invention; or 3) the module belongs to the same functional clade or sub-clade as one or more adjacent modules of the reference PKS, as determined by the evolutionary trace methodology outlined in the detailed description of the invention.

[0046] As used here, the term “linking sequence” refers to a sequence directly upstream or downstream of an inter-modular junction. For example, in a single module swap, the ACP for the upstream homologous module, the ACP and KS-AT didomain of the inserted heterologous module, and the KS of the downstream homologous module may all be considered linking sequences.

[0047] As used herein, the term “module” refers to a region of a polyketide synthase that includes multiple domains. Modules present in a polyketide synthase may include i) a loading module; ii) extending modules; and iii) releasing and/or cyclization modules, depending on whether the final polyketide is linear or cyclic. The domains which may be included in a given module include, but are not limited to, acyltransferase (AT), acyl carrier protein (ACP), keto-synthase (KS), ketoreductase (KR), dehydratase (DH), enoylreductase (ER), methyltransferase (MT), sulfhydrolase (SH), and thioesterase (TE).

[0048] As used here, the term “acceptor module” refers to a homologous module within a PKS cluster subject to engineering by module swapping. In the resulting engineered PKS cluster, the acceptor module is absent.

[0049] As used here, the term “donor module” refers to a heterologous module that is introduced into an engineered PKS cluster.

[0050] As used here, the term “module swapping” refers to the exchange of one or more heterologous donor modules for one or more homologous acceptor modules.

[0051] As used here, the term “does not substantially inhibit polyketide translocation” refers to the ability of a heterologous PKS module to function in a biosynthetic assembly line. For example, a heterologous loading module does not substantially inhibit polyketide translocation if the loading module is able to load a starter unit onto its ACP domain and pass the starter unit to the KS domain of the adjacent (n+1) extender module. A heterologous extender module does not substantially inhibit polyketide translocation if the extender module is able to receive a starter unit or polyketide chain from the previous (n−1) module, catalyze the addition of an extender unit, and pass the elongated polyketide chain to the adjacent (n+1) module. In some embodiments, a heterologous module does not substantially inhibit polyketide translocation if the engineered PKS that includes the heterologous module produces a compound in levels that are detectable by a highly sensitive detection method, e.g., LC-TOF mass spectrometry.

[0052] An extender unit, e.g., a malonyl-CoA, is loaded onto the acyl carrier protein domain of the current module catalyzed by another acyltransferase domain. The polyketide chain is then elongated by subsequent extender modules after being passed from the acyl carrier protein domain of module n to the ketosynthase domain of the n+1 module. The acyl carrier protein bound extender unit reacts with the polyketide chain bound to the ketosynthase domain with expulsion of CO₂ to produce an extended polyketide chain bound to the acyl carrier protein. Each added extender unit may then be modified by β-ketoprocessing domains, i.e., ketoreductase (which reduces the carbonyl of the elongation group to a hydroxy), dehydratase (which expels H₂O to produce an alkene), and enoylreductase (which reduces alkenes to produce saturated hydrocarbons).

### BRIEF DESCRIPTION OF THE FIGURES

[0053] FIGS. 1A and 1B are schematics illustrating the mechanisms by which PKS biosynthesis proceed. FIG. 1A depicts polyketide chain elongation and β-carbonyl processing within a module. FIG. 1B depicts translation between modules.

[0054] FIG. 2A is a diagram depicting complementary bioinformatics approaches to the prediction of functional protein-protein interactions at the module-module junction.

[0055] FIG. 2B is a phylogenetic tree resulting from multiple sequence alignments of complete FK-family modules.

[0056] FIGS. 2C-2E depict how inter-module residue covariation is used to generate an algorithm that ranks module-module junction compatibility. FIG. 2C is a diagram that illustrates the upstream and downstream module-module junctions used to determine the compatibility of a given heterologous module. FIG. 2D is a correlation map that depicts the alignment of the ACP domain of a given module and the KS-AT didomain of a second module. FIG. 2E depicts the compatibility score resulting from inter-domain residue covariation analysis for a series of heterologous modules. Scores are normalized to the homologous module for the polyketide synthase in question, which is given a score of 1.00.

[0057] FIGS. 2F and 2G depict how evolutionary trace analysis is used to predict module-module junction compatibility. FIG. 2F is a phylogenetic tree generated by multiple sequence alignments of FK-family KS and ACP domains, in which group-specific residues have been concatenated into functional clades or sub-clades. The distance between modules can be used to predict module-module junction compatibility. FIG. 2G is a schematic depicting the compatibility relationships predicted by evolutionary trace analysis between KS and ACP domains for the FK-family.

[0058] FIG. 3A is a schematic depicting a single module swap in which a donor module replaces either module 3 or module 4 of the PKS gene cluster that produces Compound 1.

[0059] FIG. 3B is an image of the engineered PKS that includes the heterologous module 3 from the S17 Streptomyces strain in place of the homologous module 3 in the PKS that produces Compound 1. The engineered PKS module 3 now includes an ER domain, and thus, the resulting compound produced by the engineered PKS, Compound 2, is reduced relative to Compound 1.

[0060] FIG. 3C is an image depicting compounds, e.g., Compound 2, Compound 3, Compound 4, and Compound 5, produced by single module swaps of either module 3 or module 4 in the PKS that produces Compound 1 with compatible heterologous modules.

[0061] FIG. 4A is a schematic depicting combinatorial swapping of a dimodule unit.

[0062] FIG. 4B is a schematic depicting the synthesis of dimodule units from exogenous donor modules by a first round of Gibson assembly. The dimodule product is shown as analyzed by DNA gel electrophoresis.

[0063] FIG. 4C is a schematic depicting dimodule capture, amplification, and enrichment in a shuttle vector. Dimodule units resulting from a first round of Gibson assembly are captured in a shuttle vector by a second round of Gibson assembly. This allows for the dimodule assembly to be amplified, enriched, and ligated into the intended PKS.

[0064] FIG. 4D is a schematic depicting the construction of dimodule libraries by combinatorial synthesis.

[0065] FIG. 4E is an image depicting the possible resulting compounds that may be generated by an exemplary dimodule library swapped into module 3 and module 4 of the PKS that produces Compound 1.

[0066] FIG. 4F depicts oversampling required for sufficient coverage of a large combinatorial dimodule library. FIG. 4F is a graphical representation of the oversampling required to achieve 90% or greater coverage of a 225 member dimodule combinatorial library. 18% of the 650 sampled clones were found to have produced polyketide compounds resulting from the engineered PKS cluster, as determined by LC-TOF mass spectrometry analysis.

[0067] FIG. 4G is a schematic depicting a method of preparing combinatorial dimodule libraries and characterizing the resulting libraries using NanoPore sequencing.

[0068] FIG. 4H is a schematic depicting the core informatics workflow for deconvoluting the sequences of combinatorial dimodule libraries by NanoPore sequencing.

[0069] FIGS. 5A and 5B depict the construction of trimodule libraries by combinatorial synthesis. FIG. 5A is a schematic illustrating a trimodule swap of modules 4, 5, and 6 of the PKS cluster that produces Compound 7, to produce a theoretical library size of 2,197 engineered polyketide synthases. FIG. 5b is an image of high efficiency trimodule assembly by Gibson assembly as analyzed by DNA gel electrophoresis.

[0070] FIG. 6A is a schematic illustrating a module swap that results in ring expansion by exchanging a single module acceptor for a dimodule donor. The resulting expanded ring compound produced by the engineered PKS, Compound 8, is also depicted.

[0071] FIG. 6B is a spectrogram that shows the production of an expanded ring compound, Compound 8, as analyzed by LC-TOF mass spectrometry.

[0072] FIG. 7A is schematic depicting the enzymatic domains of five PKS loading modules, including Rapamycin and novel PKS cluster, X23. Also shown is the starter unit associated with each loading module.

[0073] FIG. 7B depicts the compounds produced by engineered PKS clusters resulting from single module swaps in the X23 PKS cluster. The products include Compound 11 and 12, which are produced by an engineered PKS that contains a heterologous loading module.

### DETAILED DESCRIPTION OF THE INVENTION

[0074] The present invention describes compositions and methods for the production of polyketide compounds by an engineered polyketide synthase that includes one or more heterologous modules. The present invention also describes methods for predicting the compatibility of linking sequences of heterologous module-module junctions to produce an engineered polyketide synthase that does not substantially inhibit translocation during polyketide biosynthesis.

### Compounds

[0075] Compounds that may be produced with the methods of the invention include, but are not limited to, polyketides and polyketide macrolide antibiotics such as erythromycin; hybrid polyketides/non-ribosomal peptides such as rapamycin and FK506; carbohydrates including aminoglycoside antibiotics such as gentamicin, kanamycin, neomycin, tobramycin; benzofuranoids; benzopyranoids; flavonoids; glycopeptides including vancomycin; lipopeptides including daptomycin; tannins; lignans; polycyclic aromatic natural products, terpenoids, steroids, sterols, oxazolidinones including linezolid; amino acids, peptides and peptide antibiotics including polymyxins, non-ribosomal peptides, β-lactams antibiotics including carbapenems, cephalosporins, and penicillin; purines, pteridines, polypyrroles, tetracyclines, quinolones and fluoroquinolones; and sulfonamides.

### Proteins

### Polyketide Synthases

[0076] Polyketide synthases (PKSs) are a family of multi-domain enzymes that produce polyketides. Type I polyketide synthases are large, modular proteins which include several domains organized into modules. The modules generally present in a polyketide synthase include i) a loading module; ii) extending modules; and iii) releasing and/or cyclization modules depending on whether the final polyketide is linear or cyclic. The domains which generally are found in the modules are acyltransferase (AT), acyl carrier protein (ACP), keto-synthase (KS), ketoreductase (KR), dehydratase (DH), enoylreductase (ER), methyltransferase (MT), sulfhydrolase (SH), and thioesterase (TE).

[0077] A polyketide chain and the starter groups are generally bound to the thiol groups of the active site cysteines in the ketosynthase domain (the polyketide chain) and acyltransferase domain (the loading group and malonyl extender units) through a thioester linkage. Binding to acyl carrier protein (ACP) is mediated by the thiol of the phosphopantetheinyl group, which is bound to a serine hydroxyl of ACP, to form a thioester linkage to the growing polyketide chain. The growing polyketide chain is handed over from one thiol group to another by trans-acylations and is released after synthesis by hydrolysis or cyclization.

[0078] The synthesis of a polyketide begins by a starter unit, being loaded onto the acyl carrier protein domain of the PKS catalyzed by the acyltransferase in the loading module. An extender unit, e.g., a malonyl-CoA, is loaded onto the acyl carrier protein domain of the current module catalyzed by another acyltransferase domain. The polyketide chain is then elongated by subsequent extender modules after being passed from the acyl carrier protein domain of module n to the ketosynthase domain of the n+1 module. The acyl carrier protein bound extender unit reacts with the polyketide chain bound to the ketosynthase domain with expulsion of CO₂ to produce an extended polyketide chain bound to the acyl carrier protein. Each added extender unit may then be modified by β-ketoprocessing domains, i.e., ketoreductase (which reduces the carbonyl of the elongation group to a hydroxy), dehydratase (which expels H₂O to produce an alkene), and enoylreductase (which reduces alkenes to produce saturated hydrocarbons). Once the synthesis of the polyketide is complete, a thioesterase domain in the releasing modules hydrolyzes the completed polyketide chain from the acyl carrier protein of the last extending module. The compound released from the PKS may then be further modified by other proteins, e.g., nonribosomal peptide synthase. In some cases, the biosynthetic cluster harbors polyketide megasynthases and a non-ribosomal peptide synthase (NRPS). This hybrid architecture is referred to as hybrid PKS/NRPS.

### Polyketide Synthase Extender Modules

[0079] PKS biosynthesis proceeds by two key mechanisms: polyketide chain elongation within a module and translocation between modules (FIGS. 1A and 1B). The basic functional unit of polyketide synthase clusters is the extender module, which encodes a 2-carbon extender unit derived from malonyl-CoA. Within the extender module, the minimal domain architecture required for polyketide chain elongation includes the ketosynthase (KS), acyl-transferase (AT) and the ACP (acyl-carrier protein) domains, and the specific chemistry of each module is encoded by the AT domain and by the presence of the beta-carbonyl processing domains: ketoreductase (KR), dehydratase (DH), and enoylreductase (ER) domains. Productive chain elongation depends on the concerted function of numerous domains

### β-Ketone Processing Domains

[0080] β-ketone processing domains are the domains in a PKS which result in modification of the elongation groups added during the synthesis of a polyketide. Each β-ketone processing domain is capable of changing the oxidation state of an elongation group. The β-ketone processing domains include ketoreductase (which reduces the carbonyl of the elongation group to a hydroxy), dehydratase (which expels H₂O to produce an alkene), and enoylreductase (which reduces alkenes to produce saturated hydrocarbons).

### Module Swapping to Produce Engineered Polyketide Synthases

[0081] The present disclosure provides methods and compositions related to engineered polyketide synthases produced by swapping modules between related PKS clusters. Polyketide translocation is controlled by protein-protein interactions at the inter-modular junctions. In some embodiments, module swapping is guided by bioinformatic predictions to determine which modules have the highest probability of functioning in assembly-line polyketide biosynthesis. Multiple bioinformatics methods are used to determine the structural information in PKS sequence alignments to predict protein-protein interactions that mediate polyketide translocation at the inter-modular junction. The present disclosure includes a DNA assembly strategy to swap one or more heterologous donor modules for one or more acceptor modules to generate hybrid PKS clusters.

[0082] In some embodiments, module swapping is achieved by single, di- or tri-, or multi-module capture. In some embodiments, module swapping may be performed by exchange of the loading module. In some embodiments, module swapping may be performed by exchange of one or more extender modules. In some embodiments, module swapping may be performed by exchange of one or more releasing or cyclization modules. In some embodiments, two or more heterologous donor modules may replace a single acceptor module which may result in the production of a ring-expanded compound. In some embodiments, a single heterologous donor module may replace two or more acceptor modules which may result in a contracted ring compound. In some embodiments, the engineered polyketide synthases may produce novel compounds.

### Combinatorial Libraries of Engineered Polyketide Synthases

[0083] In some embodiments, the pooled capture and transfer of single, di- or tri-, or multi-module units enables the production of combinatorial libraries of engineered polyketide synthases. A dimodule unit, for example, consists of two heterologous modules, each of which may be independently selected from a pool of heterologous modules. A trimodule unit, example, consists of three heterologous modules, each of which may be independently selected from a pool of heterologous modules. One or more modules of a polyketide synthase may be replaced with a single, di-, tri-, or multi-module unit, where the single, di-, tri- or multi-module unit is selected from a pool of single- di-, tri- or multi-module units produced by combinatorial synthesis. Exemplary methods for the production of combinatorial libraries of engineered polyketide synthases (e.g., dimodule and trimodule combinatorial libraries) are provided in Examples 2 and 4.

### Characterization of Engineered PKS Libraries by Single-Molecule Long-Read Sequencing

[0084] In some embodiments of the invention, single-molecule long-read sequencing technology (e.g., Nanopore sequencing or SMRT sequencing) may be used to characterize libraries of engineered polyketide synthases which are produced by any of the methods described herein. In particular, single-molecule long-read sequencing (e.g., Nanopore sequencing or SMRT sequencing) may be used to characterize (e.g., deconvolute) combinatorial libraries of engineered polyketide synthases (e.g., combinatorial libraries of engineered polyketides synthases which are produced by pooled capture and transfer of single, di- or tri-, or multi-module units). Single-molecule long-read sequencing enables the identification of the module or modules which are incorporated into the combinatorial library. This further enables the prediction of the chemistry of the resulting plurality of engineered polyketide synthases. The predicted enzymatic chemistry can therefore be connected to the compounds produced by the engineered polyketide synthases. The resulting compounds may be identified by chemical methods of analysis known to one of skill in the art (e.g., mass spectrometry or high performance liquid chromatography). Furthermore, the predicted enzymatic chemistry can be connected to the function of the resulting compounds (e.g., binding to a target protein or inducing a phenotype, such as a cell based phenotype). Accordingly, long-read sequencing of a genetically encoded molecule may allow for genotypic-phenotypic linkage.

[0085] Single-molecule long-read sequencing technologies may be considered to include any sequencing technology which enables the sequencing of a single molecule of a biopolymer (e.g., a polynucleotide such as DNA or RNA), and which enables read lengths of greater than 2 kilobases (e.g., greater than 5 kilobases, greater than 10 kilobases, greater than 20 kilobases, greater than greater than 50 kilobases, or greater 100 kilobases). Single-molecule long-read sequencing technologies may enable the sequencing of multiple single molecules of DNA or RNA in parallel. Single-molecule long-read sequencing technologies may include sequencing technologies that rely on individual compartmentalization of each molecule of DNA or RNA being sequenced.

[0086] Nanopore sequencing is an exemplary single-molecule long-read sequencing technology that may be used to characterize libraries of engineered polyketide synthases that are prepared by any of the methods described herein. Nanopore sequencing enables the long-read sequencing of single molecules of of biopolymers (e.g., polynucleotides such as DNA or RNA). Nanopore sequencing relies on protein nanopores set in an electrically resistant polymer membrane. An ionic current is passed through the nanopores by setting a voltage across this membrane. If an analyte (e.g., a biopolymer such as DNA or RNA) passes through the pore or near its aperture, this event creates a characteristic disruption in current. The magnitude of the electric current density across a nanopore surface depends on the composition of DNA or RNA (e.g., the specific base) that is occupying the nanopore. Therefore, measurement of the current makes it possible to identify the sequence of the molecule in question. Exemplary methods for the use of Nanopore sequencing to characterize combinatorial libraries of engineered polyketide synthases are provided in Example 3.

[0087] Single molecule real-time (SMRT) sequencing (PacBio) is an exemplary single-molecule long-read sequencing technology that may be used to characterize libraries of engineered polyketide synthases that are prepared by any of the methods described herein. SMRT is a parallelized single molecule DNA sequencing method. SMRT utilizes a zero-mode waveguide (ZMW). A single DNA polymerase enzyme is affixed at the bottom of a ZMW with a single molecule of DNA as a template. The ZMW is a structure that creates an illuminated observation volume that is small enough to observe only a single nucleotide of DNA being incorporated by DNA polymerase. Each of the four DNA bases is attached to one of four different fluorescent dyes. When a nucleotide is incorporated by the DNA polymerase, the fluorescent tag is cleaved off and diffuses out of the observation area of the ZMW where its fluorescence is no longer observable. A detector detects the fluorescent signal of the nucleotide incorporation, and the base call is made according to the corresponding fluorescence of the dye.

### Computational Approaches for the Prediction of Functional Inter-Modular Junctions

[0088] The present disclosure provides complementary bioinformatic approaches for the prediction of functional protein-protein interactions at the module-module junction (FIG. 2A). In some embodiments, these bioinformatic approaches serve as the predictive basis for the design of chimeric PKS proteins by module swapping.

### Module-Level Phylogeny

[0089] Sequence divergence between polyketide modules and inter-module linkers suggests importance in module-module compatibility. In some embodiments, a module-level phylogenic map may be constructed by multiple sequence alignment of PKS modules. For example, a module-level phylogenic map was generated by multiple sequence alignments of complete FK-family modules (FIG. 2B). This enabled the identification of 10 module clades including 8 elongation, 1 loading, and 1 off-loading. In some embodiments, a heterologous module is compatible if it is present in the same module clade as the adjacent modules.

### Inter-Module Residue Covariation

[0090] Inter-module residue covariation across the intermodular junction was computed to generate an algorithm to rank order intermodule compatibility (FIGS. 2C-2E). Type I polyketide synthase protein sequences were extracted from Genbank and an internal database using Hidden Markov Models trained on the ketosynthase (KS) and acyl carrier protein (ACP) domains. Shorter peptide sequences, starting with the ACP of a module and extending through the KS and acyl transferase (AT) of the following module, were extracted to generate a multiple alignment. Positions not aligning to an amino acid from PDB entry 2JU1 (for the ACP) or 2HG4 (for KS and AT and associated linkers) were removed to compress the multiple alignment. Evolutionary couplings were then calculated using the package FreeContact. These couplings take the form of a score matrix with two indices: the first amino acid position in the multiple alignment (I) and the second amino acid position in the multiple alignment (J, which is always greater than I) and the amino acid at position J. I,J pairs with a score above a specified cutoff and in which I is within the ACP and J within the KS-AT didomain are saved.

[0091] To generate a score for a potential single module substitution, the following alignments are retrieved from the original multiple alignment: the ACP for the upstream domain, the ACP and KS-AT didomain for the inserted module, and the KS for the downstream module. These are used to synthesize two rows compatible with the original multiple alignment: one with the ACP of the upstream module and KS-AT of the inserted module and a second with the ACP of the inserted module and KS-AT of the downstream module. For each I,J pair in the saved coupling matrix, the amino acids at position I and J in the synthesized alignment are retrieved (aaI, aaJ). The mutual information for this amino acid pair within the alignment is multiplied by the coupling score to generate a raw score. The raw scores are computed for each I,J pair in the saved coupling matrix and for each of the two synthesized alignments. The sum of the raw scores for the heterologous donor domain is divided by the sum of the raw scores for the homologous native domain to generate a normalized percentage score. Candidate swaps with the same chemistry are ranked by this score. In the case of multiple module swaps, the process is expanded, e.g., if N donor domains are to be swapped in, then one synthetic alignment is generated for the preceding module's ACP domain and the first donor module's KS-AT didomain, another for the first donor modules' ACP domain and the second donor module's KS-AT didomain and so forth, concluding with the final donor domain's ACP and the first module of the recipient synthase downstream of the breakpoint. Scores are computed and normalized in the same manner: the scores for the swapped modules are normalized for the score computed for the native modules. In some embodiments, a heterologous module is compatible if the module is assigned a score of greater than or equal to 0.90 in the inter-module covariation analysis algorithm described herein.

Evolutionary Trace Analysis to Identify Modules within Functional Clades or Sub-Clades

[0092] As an additional test of module compatibility, evolutionary trace analysis may be used to identify modules that belong to the same functional clade or sub-clade (FIGS. 2F-2G). For example, phylogenetic trees with uniform branch lengths were constructed based on multiple sequence alignments of FK-family KSs and ACPs. For every non-terminal node in a tree, a vertical cutoff was applied by which terminal nodes were partitioned into groups based on shared parental nodes at the cutoff. Residues globally conserved across all groups and residues locally conserved within groups, but specific to a given group, were identified as functional residues. Globally conserved residues suggest rules that likely must be observed for all members of the FK-family. Group-specific residues suggest guidelines that may provide predictive power for engineering within the FK class. For each tree, the earliest cutoff at which the number of group-specific residues exceeded the number of globally conserved residues was selected for further analysis. Group-specific residues were concatenated into functional clades and unrooted phylogenetic trees of the clades were constructed. Distances between terminal nodes in the phylogenetic tree were used to create an evolutionary distance score (EDS). The KS and ACP EDSs between a homologous acceptor module and a proposed heterologous donor module were calculated and used to predict engineering compatibility. KS and ACP clade classifications were then used to create network maps of neighboring KSs and ACPs weighted by the frequency a given KS-ACP or ACP-KS pair was observed in FK-family polyketides. Superimposing a proposed module swap onto the network map was used to predict engineering compatibility with upstream ACPs and downstream KSs. In some embodiments, a heterologous module is compatible if the module belongs to the same functional evolutionary clade or sub-clade as one or more adjacent modules in the reference PKS.

### Regulation of Polyketide Synthase Expression

[0093] The Large ATP-binding regulators of the LuxR family of transcriptional activators (LALs) are known transcriptional regulators of polyketides such as FK506 or rapamycin. The LAL family has been found to have an active role in the induction of expression of some types of natural product gene clusters, for example PikD for pikromycin production and RapH for rapamycin production. Binding of the LAL or multiple LALs in a complex to specific sites in the promoters of genes within a gene cluster that produces a small molecule (e.g., a polyketide synthase gene cluster) potentiates expression of the gene cluster and hence promotes production of the compound (e.g., a polyketide). In some embodiments, LALs may be used for the regulation of the expression of engineered PKS clusters.

### LALs

[0094] LALs include three domains, a nucleotide-binding domain, an inducer-binding domain, and a DNA-binding domain. A defining characteristic of the structural class of regulatory proteins that include the LALs is the presence of the AAA+ ATPase domain. Nucleotide hydrolysis is coupled to large conformational changes in the proteins and/or multimerization, and nucleotide binding and hydrolysis represents a “molecular timer” that controls the activity of the LAL (e.g., the duration of the activity of the LAL). The LAL is activated by binding of a small-molecule ligand to the inducer binding site. In most cases the allosteric inducer of the LAL is unknown. In the case of the related protein MalT, the allosteric inducer is maltotriose. Possible inducers for LAL proteins include small molecules found in the environment that trigger compound (e.g., polyketide) biosynthesis. The regulation of the LAL controls production of compound-producing proteins (e.g., polyketide synthases) resulting in activation of compound (e.g., polyketide) production in the presence of external environmental stimuli. Therefore, there are gene clusters that produce small molecules (e.g., PKS gene clusters) which, while present in a strain, do not produce compound either because (i) the LAL has not been activated, (ii) the strain has LAL binding sites that differ from consensus, (iii) the strain lacks an LAL regulator, or (iv) the LAL regulator may be poorly expressed or not expressed under laboratory conditions. Since the DNA binding region of the LALs of the known PKS LALs are highly conserved, the known LALs may be used interchangeably to activate PKS gene clusters other than those which they naturally regulate. In some embodiments, the LAL is a fusion protein.

[0095] In some embodiments, an LAL may be modified to include a non-LAL DNA-binding domain, thereby forming a fusion protein including an LAL nucleotide-binding domain and a non-LAL DNA-binding domain. In certain embodiments, the non-LAL DNA-binding domain is capable of binding to a promoter including a protein-binding site positioned such that binding of the DNA-binding domain to the protein-binding site of the promoter promotes expression of a gene of interest (e.g., a gene encoding a compound-producing protein, as described herein). The non-LAL DNA binding domain may include any DNA binding domain known in the art. In some instances, the non-LAL DNA binding domain is a transcription factor DNA binding domain. Examples of non-LAL DNA binding domains include, without limitation, a basic helix-loop-helix (bHLH) domain, leucine zipper domain (e.g., a basic leucine zipper domain), GCC box domain, helix-turn-helix domain, homeodomain, srf-like domain, paired box domain, winged helix domain, zinc finger domain, HMG-box domain, Wor3 domain, OB-fold domain, immunoglobulin domain, B3 domain, TAL effector domain, Cas9 DNA binding domain, GAL4 DNA binding domain, and any other DNA binding domain known in the art. In some instances, the promoter is positioned upstream to the gene of interest, such that the fusion protein may bind to the promoter and induce or inhibit expression of the gene of interest. In certain instances, the promoter is a heterologous promoter introduced to the nucleic acid (e.g., a chromosome, plasmid, fosmid, or any other nucleic acid construct known in the art) containing the gene of interest. In other instances, the promoter is a pre-existing promoter positioned upstream to the gene of interest. The protein-binding site within the promoter may, for example, be a non-LAL protein-binding site. In certain embodiments, the protein-binding site binds to the non-LAL DNA binding domain, thereby forming a cognate DNA binding domain/protein-binding site pair.

[0096] In some embodiments, the LAL is encoded by a nucleic acid having at least 70% (e.g., at least 70%, at least 75%, at least 80%, at least 85%, at least 90%, at least 95%, at least 99%) sequence identity to any one of SEQ ID Nos: 180-212 or has a sequences with at least 70% (e.g., at least 70%, at least 75%, at least 80%, at least 85%, at least 90%, at least 95%, at least 99%) sequence identity to any one of SEQ ID Nos: 180-212.

SEQ ID NO: 180

ATGCCTGCCGTGGAGTGCTATGAACTGGACGCCCGCGATGACGAGCTCAG
AAAACTGGAGGAGGTTGTGACCGGGCGGGCCAACGGCCGGGGTGTGGTGG
TCACCATCACCGGACCGATCGCCTGCGGCAAGACCGAACTGCTCGACGCA
GCCGCCGCGAAGGCCGACGCCATCACGTTACGAGCGGTCTGCTCCGCGGA
GGAACAGGCACTCCCGTACGCCCTGATCGGGCAGCTCATCGACAACCCGG
CGCTCGCCTCCCACGCGCTGGAGCCGGCCTGCCCGACCCTCCCGGGCGAG
CACCTGTCGCCGGAGGCCGAGAACCGGCTGCGCAGCGACCTCACCCGTAC
CCTGCTGGCGCTCGCCGCCGAACGGCCGGTGCTGATCGGCATCGACGAGT
CACACGCGAACGCTTTGTGTCTGCTCCACCTGGCCCGAAGGGTCGGCTCG
GCCCGGATCGCCATGGTCCTCACCGAGTTGCGCCGGCTCACCCCGGCCCA
CTCACAGTTCCAGGCCGAGCTGCTCAGCCTGGGGCACCACCGCGAGATCG
CGCTGCGCCCGCTCAGCCCGAAGCACACCGCCGAGCTGGTCCGCGCCGGT
CTCGGTCCCGACGTCGACGAGGACGTGCTCACGGGGTTGTACCGGGCGAC
CGGCGGCAACCTGAACCTCACCCGCGGACTGATCAACGATGTGCGGGAGG
CCTGGGAGACGGGAGGGACGGGCATCAGCGCGGGCCGCGCGTACCGGCTG
GCATACCTCGGTTCCCTCTACCGCTGCGGCCCGGTCCCGTTGCGGGTCGC
ACGGGTGGCCGCCGTGCTGGGCCAGAGCGCCAACACCACCCTGGTGCGCT
GGATCAGCGGGCTCAACGCGGACGCGGTGGGCGAGGCAACCGAGATCCTC
ACCGAAGGCGGCCTGCTGCACGACCTGCGGTTCCCGCACCCGGCGGCCCG
TTCGGTGGTACTCAACGACATGTCCGCCCAGGAACGACGCCGCCTGCACC
GGTCCGCTCTGGAAGTGCTGGACGACGTGCCCGTGGAAGTGGTCGCGCAC
CACCAGGTCGGCGCCGGTCTCCTGCACGGCCCGAAGGCCGCCGAGATATT
CGCCAAGGCCGGCCAGGAGCTGCATGTGCGCGGCGAGTTGGACACCGCGT
CCGACTATCTGCAACTGGCCCACCAGGCCTCCGACGACGCCGTCACCGGG
ATGCGGGCCGAGGCCGTGGCGATCGAGCGCCGCCGCAACCCGCTGGCCTC
GAGCCGGCACCTCGACGAGCTGACCGTCGTCGCCCGTGCCGGGCTGCTCT
TCCCCGAGCACACGGCGCTGATGATCCGCTGGCTGGGCGTCGGCGGGCGG
TCCGGCGAGGCAGCCGGGCTGCTGGCCTCGCAGCGCCCCCGTGCGGTCAC
CGACCAGGACAGGGCCCATATGCGGGCCGCCGAGGTATCGCTCGCGCTGG
TCAGCCCCGGCACGTCCGGCCCGGACCGGCGGCCGCGTCCGCTCACGCCG
GATGAGCTCGCGAACCTGCCGAAGGCGGCCCGGCTCTGCGCGATCGCCGA
CAATGCCGTCATGTCGGCCCTGCGCGGTCGTCCCGAGCTCGCCGCGGCCG
AGGCGGAGAACGTCCTGCAGCACGCCGACTCGGCGGCGGCCGGCACCACC
GCCCTCGCCGCGCTGACCGCCTTGCTGTACGCGGAGAACACCGACACCGC
TCAGCTCTGGGCCGACAAGCTGGTCTCCGAGACCGGGGCGTCGAACGAGG
AGGAGGCGGGCTACGCGGGGCCGCGCGCCGAAGCCGCGTTGCGTCGCGGC
GACCTGGCCGCGGCGGTCGAGGCAGGCAGCACCGTTCTGGACCACCGGCG
GCTCTCGACGCTCGGCATCACCGCCGCGCTACCGCTGAGCAGCGCGGTGG
CCGCCGCCATCCGGCTGGGCGAGACCGAGCGGGCGGAGAAGTGGCTCGCC
CAGCCGCTGCCGCAGGCCATCCAGGACGGCCTGTTCGGCCTGCACCTGCT
CTCGGCGCGCGGCCAGTACAGCCTCGCCACGGGCCAGCACGAGTCGGCGT
ACACGGCGTTTCGCACCTGCGGGGAACGTATGCGGAACTGGGGCGTTGAC
GTGCCGGGTCTGTCCCTGTGGCGCGTCGACGCCGCCGAGGCGCTGCTGCA
CGGCCGCGACCGGGACGAGGGCCGACGGCTCGTCGACGAGCAACTCACCC
GTGCGATGGGACCCCGTTCCCGCGCCTTGACGCTGCGGGTGCAGGCGGCG
TACAGCCCGCCGGCGAAGCGGGTCGACCTGCTCGATGAAGCGGCCGACCT
GCTGCTCTCCTGCAACGACCAGTACGAGCGGGCACGGGTGCTCGCCGACC
TGAGCGAGACGTTCAGCGCGCTCCGGCACCACAGCCGGGCGCGGGGACTG
CTTCGGCAGGCCCGGCACCTGGCCGCCCAGCGCGGCGCGATACCGCTGCT
GCGCCGACTCGGGGCCAAGCCCGGAGGCCCCGGCTGGCTGGAGGAATCCG
GCCTGCCGCAGCGGATCAAGTCGCTGACCGACGCGGAGCGGCGGGTGGCG
TCGCTGGCCGCCGGCGGACAGACCAACCGCGTGATCGCCGACCAGCTCTT
CGTCACGGCCAGCACGGTGGAGCAGCACCTCACGGACGTCTCCACTGGGT
CAAGGCCGCCAGCACCTGCCGCCGAACTCGTCTAG

SEQ ID NO: 181

ATGCCTGCCGTGGAGTGCTATGAACTGGACGCCCGCGATGACGAGCTCAG
AAAACTGGAGGAGGTTGTGACCGGGCGGGCCAACGGCCGGGGTGTGGTGG
TCACCATCACCGGACCGATCGCCTGCGGCAAGACCGAACTGCTCGACGCA
GCCGCCGCGAAGGCCGACGCCATCACGCTGCGAGCGGTCTGCTCCGCGGA
GGAACAGGCACTCCCGTACGCCCTGATCGGGCAGCTCATCGACAACCCGG
CGCTCGCCTCCCACGCGCTGGAGCCGGCCTGCCCGACCCTCCCGGGCGAG
CACCTGTCGCCGGAGGCCGAGAACCGGCTGCGCAGCGACCTCACCCGTAC
CCTGCTGGCGCTCGCCGCCGAACGGCCGGTGCTGATCGGCATCGACGAGT
CACACGCGAACGCTTTGTGTCTGCTCCACCTGGCCCGAAGGGTCGGCTCG
GCCCGGATCGCCATGGTCCTCACCGAGTTGCGCCGGCTCACCCCGGCCCA
CTCACAGTTCCAGGCCGAGCTGCTCAGCCTGGGGCACCACCGCGAGATCG
CGCTGCGCCCGCTCAGCCCGAAGCACACCGCCGAGCTGGTCCGCGCCGGT
CTCGGTCCCGACGTCGACGAGGACGTGCTCACGGGGTTGTACCGGGCGAC
CGGCGGCAACCTGAACCTCACCCGCGGACTGATCAACGATGTGCGGGAGG
CCTGGGAGACGGGAGGGACGGGCATCAGCGCGGGCCGCGCGTACCGGCTG
GCATACCTCGGTTCCCTCTACCGCTGCGGCCCGGTCCCGTTGCGGGTCGC
ACGGGTGGCCGCCGTGCTGGGCCAGAGCGCCAACACCACCCTGGTGCGCT
GGATCAGCGGGCTCAACGCGGACGCGGTGGGCGAGGCAACCGAGATCCTC
ACCGAAGGCGGCCTGCTGCACGACCTGCGGTTCCCGCACCCGGCGGCCCG
TTCGGTGGTACTCAACGACATGTCCGCCCAGGAACGACGCCGCCTGCACC
GGTCCGCTCTGGAAGTGCTGGACGACGTGCCCGTGGAAGTGGTCGCGCAC
CACCAGGTCGGCGCCGGTCTCCTGCACGGCCCGAAGGCCGCCGAGATATT
CGCCAAGGCCGGCCAGGAGCTGCATGTGCGCGGCGAGTTGGACACCGCGT
CCGACTATCTGCAACTGGCCCACCAGGCCTCCGACGACGCCGTCACCGGG
ATGCGGGCCGAGGCCGTGGCGATCGAGCGCCGCCGCAACCCGCTGGCCTC
GAGCCGGCACCTCGACGAGCTGACCGTCGTCGCCCGTGCCGGGCTGCTCT
TCCCCGAGCACACGGCGCTGATGATCCGCTGGCTGGGCGTCGGCGGGCGG
TCCGGCGAGGCAGCCGGGCTGCTGGCCTCGCAGCGCCCCCGTGCGGTCAC
CGACCAGGACAGGGCCCATATGCGGGCCGCCGAGGTATCGCTCGCGCTGG
TCAGCCCCGGCACGTCCGGCCCGGACCGGCGGCCGCGTCCGCTCACGCCG
GATGAGCTCGCGAACCTGCCGAAGGCGGCCCGGCTCTGCGCGATCGCCGA
CAATGCCGTCATGTCGGCCCTGCGCGGTCGTCCCGAGCTCGCCGCGGCCG
AGGCGGAGAACGTCCTGCAGCACGCCGACTCGGCGGCGGCCGGCACCACC
GCCCTCGCCGCGCTGACCGCCTTGCTGTACGCGGAGAACACCGACACCGC
TCAGCTCTGGGCCGACAAGCTGGTCTCCGAGACCGGGGCGTCGAACGAGG
AGGAGGCGGGCTACGCGGGGCCGCGCGCCGAAGCCGCGTTGCGTCGCGGC
GACCTGGCCGCGGCGGTCGAGGCAGGCAGCACCGTTCTGGACCACCGGCG
GCTCTCGACGCTCGGCATCACCGCCGCGCTACCGCTGAGCAGCGCGGTGG
CCGCCGCCATCCGGCTGGGCGAGACCGAGCGGGCGGAGAAGTGGCTCGCC
CAGCCGCTGCCGCAGGCCATCCAGGACGGCCTGTTCGGCCTGCACCTGCT
CTCGGCGCGCGGCCAGTACAGCCTCGCCACGGGCCAGCACGAGTCGGCGT
ACACGGCGTTTCGCACCTGCGGGGAACGTATGCGGAACTGGGGCGTTGAC
GTGCCGGGTCTGTCCCTGTGGCGCGTCGACGCCGCCGAGGCGCTGCTGCA
CGGCCGCGACCGGGACGAGGGCCGACGGCTCGTCGACGAGCAACTCACCC
GTGCGATGGGACCCCGTTCCCGCGCCTTGACGCTGCGGGTGCAGGCGGCG
TACAGCCCGCCGGCGAAGCGGGTCGACCTGCTCGATGAAGCGGCCGACCT
GCTGCTCTCCTGCAACGACCAGTACGAGCGGGCACGGGTGCTCGCCGACC
TGAGCGAGACGTTCAGCGCGCTCCGGCACCACAGCCGGGCGCGGGGACTG
CTTCGGCAGGCCCGGCACCTGGCCGCCCAGCGCGGCGCGATACCGCTGCT
GCGCCGACTCGGGGCCAAGCCCGGAGGCCCCGGCTGGCTGGAGGAATCCG
GCCTGCCGCAGCGGATCAAGTCGCTGACCGACGCGGAGCGGCGGGTGGCG
TCGCTGGCCGCCGGCGGACAGACCAACCGCGTGATCGCCGACCAGCTCTT
CGTCACGGCCAGCACGGTGGAGCAGCACCTCACGGACGTCTCCACTGGGT
CAAGGCCGCCAGCACCTGCCGCCGAACTCGTCTAG

SEQ ID NO: 182

GTGGTTCCTGAAGTGCGAGCAGCCCCCGACGAACTGATCGCCCGCGATGA
CGAGCTGAGCCGCCTCCAACGGGCACTCACCAGGGCGGGGAGCGGAAGGG
GCGGCGTCGTCGCCATCACCGGGCCCATCGCCAGCGGAAAGACGGCGCTG
CTCGACGCCGGAGCGGCCAAGTCCGGCTTCGTCGCACTCCGTGCGGTGTG
CTCCTGGGAAGAGCGCACTCTGCCGTACGGGATGCTGGGCCAGCTCTTCG
ACCATCCCGAACTGGCCGCCCAGGCGCCGGACCTTGCCCACTTCACGGCT
TCGTGCGAGAGCCCTCAGGCCGGTACCGACAACCGCCTGCGGGCCGAGTT
CACCCGCACCCTGCTGGCGCTCGCCGCGGACTGGCCCGTCCTGATCGGCA
TCGACGACGTGCACCACGCCGACGCGGAATCACTGCGCTGTCTGCTCCAC
CTCGCCCGCCGCATCGGCCCGGCCCGCATCGCGGTCGTACTGACCGAGCT
GCGCAGACCGACGCCCGCCGACTCCCGCTTCCAGGCGGAACTGCTGAGCC
TGCGCTCCTACCAGGAGATCGCGCTCAGACCGCTCACCGAGGCGCAGACC
GGCGAACTCGTACGTCGGCACCTCGGCGCGGAGACCCACGAGGACGTCTC
CGCCGATACGTTCCGGGCGACCGGCGGGAACCTGCTCCTCGGGCACGGTT
TGATCAATGACATCCGGGAGGCGCGGACAGCGGGACGGCCGGGGGTCGTC
GCGGGGCGGGCGTACCGGCTCGCGTACCTCAGCTCGCTCTACCGCTGCGG
CCCGAGCGCGCTGCGTGTCGCCCGGGCGTCCGCCGTGCTCGGCGCGAGCG
CCGAAGCCGTGCTCGTCCAGCGGATGACCGGACTGAACAAGGACGCGGTC
GAACAGGTCTATGAGCAGCTGAACGAGGGACGGCTGCTGCAGGGCGAGCG
GTTTCCGCACCCGGCGGCCCGCTCCATCGTCCTTGACGACCTGTCGGCCC
TGGAACGCAGAAACCTGCACGAGTCGGCGCTGGAGCTGCTGCGGGACCAC
GGCGTGGCCGGCAACGTGCTCGCCCGCCACCAGATCGGCGCCGGCCGGGT
GCACGGCGAGGAGGCCGTCGAGCTGTTCACCGGGGCCGCACGGGAGCACC
ACCTGCGCGGTGAACTGGACGACGCGGCCGGATACCTGGAACTCGCCCAC
CGTGCCTCCGACGACCCCGTCACGCGCGCCGCACTACGCGTCGGCGCCGC
CGCGATCGAGCGCCTCTGCAATCCGGTACGGGCAGGCCGGCATCTGCCCG
AGCTGCTCACCGCGTCGCGCGCGGGACTGCTCTCCAGCGAGCACGCCGTG
TCGCTCGCCGACTGGCTGGCGATGGGCGGGCGCCCGGGCGAGGCGGCCGA
GGTCCTCGCGACGCAGCGTCCCGCGGCCGACAGCGAGCAGCACCGCGCAC
TCCTGCGCAGCGGCGAGTTGTCCCTCGCGCTGGTCCACCCCGGCGCGTGG
GATCCGTTGCGCCGGACCGATCGGTTCGCCGCGGGCGGGCTCGGCTCGCT
TCCCGGACCCGCCCGGCACCGCGCGGTCGCCGACCAAGCCGTCATCGCGG
CGCTGCGTGGACGTCTCGACCGGGCGGACGCCAACGCGGAGAGCGTTCTC
CAGCACACCGACGCCACGGCGGACCGGACCACGGCCATCATGGCGTTGCT
GGCCCTGCTCTACGCGGAGAACACCGATGCTGTCCAGTTCTGGGTCGACA
AACTGGCCGGTGACGAGGGCACCAGGACACCGGCCGACGAGGCGGTCCAC
GCGGGGTTCAACGCCGAGATCGCGCTGCGCCGCGGCGACTTGATGAGAGC
CGTCGAGTACGGCGAGGCAGCGCTCGGCCACCGGCACCTGCCCACCTGGG
GAATGGCCGCCGCTCTGCCGCTGAGCAGCACCGTGGTTGCCGCGATCCGG
CTCGGCGACCTCGACAGGGCCGAGCGGTGGCTCGCCGAGCCGCTGCCGCA
GCAGACGCCGGAGAGCCTCTTCGGGCTGCACCTGCTCTGGGCCCGCGGGC
AGCACCACCTCGCGACCGGGCGGCACGGGGCGGCGTACACGGCGTTCAGG
GAATGCGGCGAGCGGATGCGGCGGTGGGCCGTCGACGTGCCGGGCCTGGC
CCTGTGGCGGGTCGACGCCGCCGAATCGCTGCTGCTGCTCGGCCGTGACC
GTGCCGAAGGACTGCGGCTCGTCTCCGAGCAGCTGTCCCGGCCGATGCGC
CCTCGCGCGCGCGTGCAGACGTTACGGGTACAGGCGGCCTACAGTCCGCC
GCCCCAACGGATCGACCTGCTCGAAGAGGCCGCCGACCTGCTGGTCACCT
GCAACGACCAGTACGAACTGGCAAACGTACTCAGCGACTTGGCAGAGGCC
TCCAGCATGGTCCGGCAGCACAGCAGGGCGCGGGGTCTGCTCCGCCGGGC
ACGGCACCTCGCCACCCAGTGCGGCGCCGTGCCGCTCCTGCGGCGGCTCG
GCGCGGAACCCTCGGACATCGGCGGAGCCTGGGACGCGACGCTGGGACAG
CGGATCGCGTCACTGACGGAGTCGGAGCGGCGGGTGGCCGCGCTCGCCGC
GGTCGGGCGTACGAACAGGGAGATCGCCGAGCAGCTGTTCGTCACGGCCA
GCACGGTGGAACAGCACCTCACGAACGTGTTCCGCAAACTGGCGGTGAAG
GGCCGCCAGCAGCTTCCGAAGGAACTGGCCGACGTCGGCGAGCCGGCGGA
CCGCGACCGCCGGTGCGGGTAG

SEQ ID NO: 183

ATGGTTCCTGAAGTGCGAGCAGCCCCCGACGAACTGATCGCCCGCGATGA
CGAGCTGAGCCGCCTCCAACGGGCACTCACCAGGGCGGGGAGCGGAAGGG
GCGGCGTCGTCGCCATCACCGGGCCCATCGCCAGCGGAAAGACGGCGCTG
CTCGACGCCGGAGCGGCCAAGTCCGGCTTCGTCGCACTCCGTGCGGTGTG
CTCCTGGGAAGAGCGCACTCTGCCGTACGGGATGCTGGGCCAGCTCTTCG
ACCATCCCGAACTGGCCGCCCAGGCGCCGGACCTTGCCCACTTCACGGCT
TCGTGCGAGAGCCCTCAGGCCGGTACCGACAACCGCCTGCGGGCCGAGTT
CACCCGCACCCTGCTGGCGCTCGCCGCGGACTGGCCCGTCCTGATCGGCA
TCGACGACGTGCACCACGCCGACGCGGAATCACTGCGCTGTCTGCTCCAC
CTCGCCCGCCGCATCGGCCCGGCCCGCATCGCGGTCGTACTGACCGAGCT
GCGCAGACCGACGCCCGCCGACTCCCGCTTCCAGGCGGAACTGCTGAGCC
TGCGCTCCTACCAGGAGATCGCGCTCAGACCGCTCACCGAGGCGCAGACC
GGCGAACTCGTACGTCGGCACCTCGGCGCGGAGACCCACGAGGACGTCTC
CGCCGATACGTTCCGGGCGACCGGCGGGAACCTGCTCCTCGGGCACGGTT
TGATCAATGACATCCGGGAGGCGCGGACAGCGGGACGGCCGGGGGTCGTC
GCGGGGCGGGCGTACCGGCTCGCGTACCTCAGCTCGCTCTACCGCTGCGG
CCCGAGCGCGCTGCGTGTCGCCCGGGCGTCCGCCGTGCTCGGCGCGAGCG
CCGAAGCCGTGCTCGTCCAGCGGATGACCGGACTGAACAAGGACGCGGTC
GAACAGGTCTATGAGCAGCTGAACGAGGGACGGCTGCTGCAGGGCGAGCG
GTTTCCGCACCCGGCGGCCCGCTCCATCGTCCTTGACGACCTGTCGGCCC
TGGAACGCAGAAACCTGCACGAGTCGGCGCTGGAGCTGCTGCGGGACCAC
GGCGTGGCCGGCAACGTGCTCGCCCGCCACCAGATCGGCGCCGGCCGGGT
GCACGGCGAGGAGGCCGTCGAGCTGTTCACCGGGGCCGCACGGGAGCACC
ACCTGCGCGGTGAACTGGACGACGCGGCCGGATACCTGGAACTCGCCCAC
CGTGCCTCCGACGACCCCGTCACGCGCGCCGCACTACGCGTCGGCGCCGC
CGCGATCGAGCGCCTCTGCAATCCGGTACGGGCAGGCCGGCATCTGCCCG
AGCTGCTCACCGCGTCGCGCGCGGGACTGCTCTCCAGCGAGCACGCCGTG
TCGCTCGCCGACTGGCTGGCGATGGGCGGGCGCCCGGGCGAGGCGGCCGA
GGTCCTCGCGACGCAGCGTCCCGCGGCCGACAGCGAGCAGCACCGCGCAC
TCCTGCGCAGCGGCGAGTTGTCCCTCGCGCTGGTCCACCCCGGCGCGTGG
GATCCGTTGCGCCGGACCGATCGGTTCGCCGCGGGCGGGCTCGGCTCGCT
TCCCGGACCCGCCCGGCACCGCGCGGTCGCCGACCAAGCCGTCATCGCGG
CGCTGCGTGGACGTCTCGACCGGGCGGACGCCAACGCGGAGAGCGTTCTC
CAGCACACCGACGCCACGGCGGACCGGACCACGGCCATCATGGCGTTGCT
GGCCCTGCTCTACGCGGAGAACACCGATGCTGTCCAGTTCTGGGTCGACA
AACTGGCCGGTGACGAGGGCACCAGGACACCGGCCGACGAGGCGGTCCAC
GCGGGGTTCAACGCCGAGATCGCGCTGCGCCGCGGCGACTTGATGAGAGC
CGTCGAGTACGGCGAGGCAGCGCTCGGCCACCGGCACCTGCCCACCTGGG
GAATGGCCGCCGCTCTGCCGCTGAGCAGCACCGTGGTTGCCGCGATCCGG
CTCGGCGACCTCGACAGGGCCGAGCGGTGGCTCGCCGAGCCGCTGCCGCA
GCAGACGCCGGAGAGCCTCTTCGGGCTGCACCTGCTCTGGGCCCGCGGGC
AGCACCACCTCGCGACCGGGCGGCACGGGGCGGCGTACACGGCGTTCAGG
GAATGCGGCGAGCGGATGCGGCGGTGGGCCGTCGACGTGCCGGGCCTGGC
CCTGTGGCGGGTCGACGCCGCCGAATCGCTGCTGCTGCTCGGCCGTGACC
GTGCCGAAGGACTGCGGCTCGTCTCCGAGCAGCTGTCCCGGCCGATGCGC
CCTCGCGCGCGCGTGCAGACGCTGCGGGTACAGGCGGCCTACAGTCCGCC
GCCCCAACGGATCGACCTGCTCGAAGAGGCCGCCGACCTGCTGGTCACCT
GCAACGACCAGTACGAACTGGCAAACGTACTCAGCGACTTGGCAGAGGCC
TCCAGCATGGTCCGGCAGCACAGCAGGGCGCGGGGTCTGCTCCGCCGGGC
ACGGCACCTCGCCACCCAGTGCGGCGCCGTGCCGCTCCTGCGGCGGCTCG
GCGCGGAACCCTCGGACATCGGCGGAGCCTGGGACGCGACGCTGGGACAG
CGGATCGCGTCACTGACGGAGTCGGAGCGGCGGGTGGCCGCGCTCGCCGC
GGTCGGGCGTACGAACAGGGAGATCGCCGAGCAGCTGTTCGTCACGGCCA
GCACGGTGGAACAGCACCTCACGAACGTGTTCCGCAAACTGGCGGTGAAG
GGCCGCCAGCAGCTTCCGAAGGAACTGGCCGACGTCGGCGAGCCGGCGGA
CCGCGACCGCCGGTGCGGGTAG

SEQ ID NO: 184

GTGATAGCGCGCTTATCTCCCCCAGACCTGATCGCCCGCGATGACGAGTT
CGGTTCCCTCCACCGGGCGCTCACCCGAGCGGGGGGCGGGCGGGGCGTCG
TCGCCGCCGTCACCGGGCCGATCGCCTGCGGCAAGACCGAACTCCTCGAC
GCCGCCGCGGCCAAGGCCGGCTTCGTCACCCTTCGCGCGGTGTGCTCCAT
GGAGGAGCGGGCCCTGCCGTACGGCATGCTCGGCCAGCTCCTCGACCAGC
CCGAGCTGGCCGCCCGGACACCGGAGCTGGTCCGGCTGACGGCATCGTGC
GAAAACCTGCCGGCCGACGTCGACAACCGCCTGGGGACCGAACTCACCCG
CACGGTGCTGACGCTCGCCGCGGAGCGGCCCGTACTGATCGGCATCGACG
ACGTGCACCACGCCGACGCGCCGTCGCTGCGCTGCCTGCTCCACCTCGCG
CGCCGCATCAGCCGGGCCCGTGTCGCCATCGTGCTGACCGAGCTGCTCCG
GCCGACGCCCGCCCACTCCCAATTCCGGGCGGCACTGCTGAGTCTGCGCC
ACTACCAGGAGATCGCGCTGCGCCCGCTCACCGAGGCGCAGACCACCGAA
CTCGTGCGCCGGCACCTCGGCCAGGACGCGCACGACGACGTGGTGGCCCA
GGCGTTCCGGGCGACCGGCGGCAACCTGCTCCTCGGCCACGGCCTGATCG
ACGACATCCGGGAGGCACGGACACGGACCTCAGGGTGCCTGGAAGTGGTC
GCGGGGCGGGCGTACCGGCTCGCCTACCTCGGGTCGCTCTATCGTTGCGG
CCCGGCCGCGCTGAGCGTCGCCCGAGCTTCCGCCGTGCTCGGCGAGAGTG
TCGAACTCACCCTCGTCCAGCGGATGACCGGCCTCGACACCGAGGCGGTC
GAGCAGGCCCACGAACAGCTGGTCGAGGGGCGGCTGCTGCGGGAAGGGCG
GTTCCCGCACCCCGCGGCCCGCTCCGTCGTACTCGACGACCTCTCCGCCG
CCGAGCGGCGTGGCCTGCACGAGCTGGCGCTGGAACTGCTGCGGGACCGC
GGCGTGGCCAGCAAGGTGCTCGCCCGCCACCAGATGGGTACCGGCCGGGT
GCACGGCGCCGAGGTCGCCGGGCTGTTCACCGACGCCGCGCGCGAGCACC
ACCTGCGCGGCGAGCTCGACGAGGCCGTCACCTACCTGGAGTTCGCCTAC
CGGGCCTCCGACGACCCCGCCGTCCACGCCGCACTGCGCGTCGACACCGC
CGCCATCGAGCGGCTCTGCGATCCCGCCAGATCCGGCCGGCATGTGCCCG
AGCTGCTCACCGCGTCGCGGGAACGGCTCCTCTCCAGCGAGCACGCCGTG
TCGCTCGCCTGCTGGCTGGCGATGGACGGGCGGCCGGGCGAGGCCGCCGA
GGTCCTGGCGGCCCAGCGCTCCGCCGCCCCGAGCGAGCAGGGCCGGGCGC
ACCTGCGCGTCGCGGACCTGTCCCTCGCGCTGATCTATCCCGGCGCGGCC
GATCCGCCGCGTCCGGCCGATCCGCCGGCCGAGGACGAGGTCGCCTCGTT
TTCCGGAGCCGTCCGGCACCGCGCCGTCGCCGACAAGGCCCTGAGCAACG
CGCTGCGCGGCTGGTCCGAACAGGCCGAGGCCAAAGCCGAGTACGTGCTC
CAGCACTCCCGGGTCACGACGGACCGGACCACGACCATGATGGCGTTGCT
GGCCCTGCTCTACGCCGAGGACACCGATGCCGTCCAGTCCTGGGTCGACA
AGCTGGCCGGTGACGACAACATGCGGACCCCGGCCGACGAGGCGGTCCAC
GCGGGGTTCCGCGCCGAGGCCGCGCTGCGCCGCGGCGACCTGACCGCCGC
CGTCGAATGCGGCGAGGCCGCGCTCGCCCCCCGGGTCGTGCCCTCCTGGG
GGATGGCCGCCGCATTGCCGCTGAGCAGCACCGTGGCCGCCGCGATCCGA
CTGGGCGACCTGGACCGGGCGGAGCGGTGGCTCGCCGAGCCGTTGCCGGA
GGAGACCTCCGACAGCCTCTTCGGACTGCACATGGTCTGGGCCCGTGGGC
AACACCATCTCGCGGCCGGGCGGTACCGGGCGGCGTACAACGCGTTCCGG
GACTGCGGGGAGCGGATGCGACGCTGGTCCGTCGACGTGCCGGGCCTGGC
CCTGTGGCGGGTCGACGCCGCCGAAGCGCTTCTGCTGCTCGGCCGCGGCC
GTGACGAGGGGCTGAGGCTCATCTCCGAGCAGCTGTCCCGGCCGATGGGG
TCCCGGGCGCGGGTGATGACGCTGCGGGTGCAGGCGGCCTACAGTCCGCC
GGCCAAGCGGATCGAACTGCTCGACGAGGCCGCCGATCTGCTCATCATGT
GCCGCGACCAGTACGAGCTGGCCCGCGTCCTCGCCGACATGGGCGAAGCG
TGCGGCATGCTCCGGCGGCACAGCCGTGCGCGGGGACTGTTCCGCCGCGC
ACGGCACCTCGCGACCCAGTGCGGAGCCGTGCCGCTCCTCCGGCGGCTCG
GTGGGGAGTCCTCGGACGCGGACGGCACCCAGGACGTGACGCCGGCGCAG
CGGATCACATCGCTGACCGAGGCGGAGCGGCGGGTGGCGTCGCACGCCGC
GGTCGGGCGCACCAACAAGGAGATCGCCAGCCAGCTGTTCGTCACCTCCA
GCACGGTGGAACAGCACCTCACCAACGTGTTCCGCAAGCTGGGGGTGAAG
GGCCGTCAGCAACTGCCCAAGGAACTGTCCGACGCCGGCTGA

SEQ ID NO: 185

ATGATAGCGCGCCTGTCTCCCCCAGACCTGATCGCCCGCGATGACGAGTT
CGGTTCCCTCCACCGGGCGCTCACCCGAGCGGGGGGCGGGCGGGGCGTCG
TCGCCGCCGTCACCGGGCCGATCGCCTGCGGCAAGACCGAACTCCTCGAC
GCCGCCGCGGCCAAGGCCGGCTTCGTCACCCTTCGCGCGGTGTGCTCCAT
GGAGGAGCGGGCCCTGCCGTACGGCATGCTCGGCCAGCTCCTCGACCAGC
CCGAGCTGGCCGCCCGGACACCGGAGCTGGTCCGGCTGACGGCATCGTGC
GAAAACCTGCCGGCCGACGTCGACAACCGCCTGGGGACCGAACTCACCCG
CACGGTGCTGACGCTCGCCGCGGAGCGGCCCGTACTGATCGGCATCGACG
ACGTGCACCACGCCGACGCGCCGTCGCTGCGCTGCCTGCTCCACCTCGCG
CGCCGCATCAGCCGGGCCCGTGTCGCCATCGTGCTGACCGAGCTGCTCCG
GCCGACGCCCGCCCACTCCCAATTCCGGGCGGCACTGCTGAGTCTGCGCC
ACTACCAGGAGATCGCGCTGCGCCCGCTCACCGAGGCGCAGACCACCGAA
CTCGTGCGCCGGCACCTCGGCCAGGACGCGCACGACGACGTGGTGGCCCA
GGCGTTCCGGGCGACCGGCGGCAACCTGCTCCTCGGCCACGGCCTGATCG
ACGACATCCGGGAGGCACGGACACGGACCTCAGGGTGCCTGGAAGTGGTC
GCGGGGCGGGCGTACCGGCTCGCCTACCTCGGGTCGCTCTATCGTTGCGG
CCCGGCCGCGCTGAGCGTCGCCCGAGCTTCCGCCGTGCTCGGCGAGAGTG
TCGAACTCACCCTCGTCCAGCGGATGACCGGCCTCGACACCGAGGCGGTC
GAGCAGGCCCACGAACAGCTGGTCGAGGGGCGGCTGCTGCGGGAAGGGCG
GTTCCCGCACCCCGCGGCCCGCTCCGTCGTACTCGACGACCTCTCCGCCG
CCGAGCGGCGTGGCCTGCACGAGCTGGCGCTGGAACTGCTGCGGGACCGC
GGCGTGGCCAGCAAGGTGCTCGCCCGCCACCAGATGGGTACCGGCCGGGT
GCACGGCGCCGAGGTCGCCGGGCTGTTCACCGACGCCGCGCGCGAGCACC
ACCTGCGCGGCGAGCTCGACGAGGCCGTCACCTACCTGGAGTTCGCCTAC
CGGGCCTCCGACGACCCCGCCGTCCACGCCGCACTGCGCGTCGACACCGC
CGCCATCGAGCGGCTCTGCGATCCCGCCAGATCCGGCCGGCATGTGCCCG
AGCTGCTCACCGCGTCGCGGGAACGGCTCCTCTCCAGCGAGCACGCCGTG
TCGCTCGCCTGCTGGCTGGCGATGGACGGGCGGCCGGGCGAGGCCGCCGA
GGTCCTGGCGGCCCAGCGCTCCGCCGCCCCGAGCGAGCAGGGCCGGGCGC
ACCTGCGCGTCGCGGACCTGTCCCTCGCGCTGATCTATCCCGGCGCGGCC
GATCCGCCGCGTCCGGCCGATCCGCCGGCCGAGGACGAGGTCGCCTCGTT
TTCCGGAGCCGTCCGGCACCGCGCCGTCGCCGACAAGGCCCTGAGCAACG
CGCTGCGCGGCTGGTCCGAACAGGCCGAGGCCAAAGCCGAGTACGTGCTC
CAGCACTCCCGGGTCACGACGGACCGGACCACGACCATGATGGCGTTGCT
GGCCCTGCTCTACGCCGAGGACACCGATGCCGTCCAGTCCTGGGTCGACA
AGCTGGCCGGTGACGACAACATGCGGACCCCGGCCGACGAGGCGGTCCAC
GCGGGGTTCCGCGCCGAGGCCGCGCTGCGCCGCGGCGACCTGACCGCCGC
CGTCGAATGCGGCGAGGCCGCGCTCGCCCCCCGGGTCGTGCCCTCCTGGG
GGATGGCCGCCGCATTGCCGCTGAGCAGCACCGTGGCCGCCGCGATCCGA
CTGGGCGACCTGGACCGGGCGGAGCGGTGGCTCGCCGAGCCGTTGCCGGA
GGAGACCTCCGACAGCCTCTTCGGACTGCACATGGTCTGGGCCCGTGGGC
AACACCATCTCGCGGCCGGGCGGTACCGGGCGGCGTACAACGCGTTCCGG
GACTGCGGGGAGCGGATGCGACGCTGGTCCGTCGACGTGCCGGGCCTGGC
CCTGTGGCGGGTCGACGCCGCCGAAGCGCTTCTGCTGCTCGGCCGCGGCC
GTGACGAGGGGCTGAGGCTCATCTCCGAGCAGCTGTCCCGGCCGATGGGG
TCCCGGGCGCGGGTGATGACGCTGCGGGTGCAGGCGGCCTACAGTCCGCC
GGCCAAGCGGATCGAACTGCTCGACGAGGCCGCCGATCTGCTCATCATGT
GCCGCGACCAGTACGAGCTGGCCCGCGTCCTCGCCGACATGGGCGAAGCG
TGCGGCATGCTCCGGCGGCACAGCCGTGCGCGGGGACTGTTCCGCCGCGC
ACGGCACCTCGCGACCCAGTGCGGAGCCGTGCCGCTCCTCCGGCGGCTCG
GTGGGGAGTCCTCGGACGCGGACGGCACCCAGGACGTGACGCCGGCGCAG
CGGATCACATCGCTGACCGAGGCGGAGCGGCGGGTGGCGTCGCACGCCGC
GGTCGGGCGCACCAACAAGGAGATCGCCAGCCAGCTGTTCGTCACCTCCA
GCACGGTGGAACAGCACCTCACCAACGTGTTCCGCAAGCTGGGGGTGAAG
GGCCGTCAGCAACTGCCCAAGGAACTGTCCGACGCCGGCTGA

SEQ ID NO: 186

GTGGAGTTTTACGACCTGGTCGCCCGCGATGACGAGCTCAGAAGGTTGGA
CCAGGCCCTCGGCCGCGCCGCCGGCGGACGGGGTGTCGTGGTCACCGTCA
CCGGACCGGTCGGCTGCGGCAAGACCGAACTGCTGGACGCGGCCGCGGCC
GAGGAGGAATTCATCACGTTGCGTGCGGTCTGCTCGGCCGAGGAGCGGGC
CCTGCCGTACGCCGTGATCGGCCAACTCCTCGACCATCCCGTACTCTCCG
CACGCGCGCCCGACCTGGCCTGCGTGACGGCTCCGGGCCGGACGCTGCCG
GCCGACACCGAGAACCGCCTGCGCCGCGACCTCACCCGGGCCCTGCTGGC
CCTGGCCTCCGAACGACCGGTTCTGATCTGCATCGACGACGTGCACCAGG
CCGACACCGCCTCGCTGAACTGCCTGCTGCACCTGGCCCGGCGGGTCGCC
TCGGCCCGGATCGCCATGATCCTCACCGAGTTGCGCCGGCTCACCCCGGC
TCACTCCCGGTTCGAGGCGGAACTGCTCAGCCTGCGGCACCGCCACGAGA
TCGCGCTGCGTCCCCTCGGCCCGGCCGACACCGCCGAACTGGCCCGCGCC
CGGCTCGGCGCCGGCGTCACCGCCGACGAGCTGGCCCAGGTCCACGAGGC
CACCAGCGGGAACCCCAACCTGGTCGGAGGCCTGGTCAACGACGTGCGAG
AGGCCTGGGCGGCCGGTGGCACGGGCATTGCGGCGGGGCGGGCGTACCGG
CTGGCGTACCTCAGCTCCGTGTACCGCTGTGGTCCGGTCCCGTTGCGGAT
CGCCCAGGCGGCGGCGGTGCTGGGTCCCAGCGCCACCGTCACGCTGGTGC
GCCGGATCAGCGGGCTCGACGCCGAGACGGTGGACGAGGCGACCGCGATC
CTCACCGAGGGCGGCCTGCTCCGGGACCACCGGTTCCCGCATCCGGCGGC
CCGCTCGGTCGTACTCGACGACATGTCCGCGCAGGAACGCCGCCGCCTGC
ACCGGTCCACGCTGGACGTGCTGGACGGCGTACCCGTCGACGTGCTCGCG
CACCACCAGGCCGGCGCCGGTCTGCTGCACGGCCCGCAGGCGGCCGAGAT
GTTCGCCCGGGCCAGCCAGGAGCTGCGGGTACGCGGCGAGCTGGACGCCG
CGACCGAGTACCTGCAACTGGCCTACCGGGCCTCCGACGACGCCGGCGCC
CGGGCCGCCCTGCAGGTGGAGACCGTGGCCGGCGAGCGCCGCCGCAACCC
GCTGGCCGCCAGCCGGCACCTGGACGAGCTGGCCGCCGCCGCCCGGGCCG
GCCTGCTGTCGGCCGAGCACGCCGCCCTGGTCGTGCACTGGCTGGCCGAC
GCCGGACGACCCGGCGAGGCCGCCGAGGTGCTGGCGCTGCAGCGGGCGCT
GGCCGTCACCGACCACGACCGGGCCCGCCTGCGGGCGGCCGAGGTGTCGC
TCGCGCTGTTCCACCCCGGCGTCCCCGGTTCGGACCCGCGGCCCCTCGCG
CCGGAGGAGCTCGCGAGCCTGTCCCTGTCGGCCCGGCACGGTGTGACCGC
CGACAACGCGGTGCTGGCGGCGCTGCGCGGCCGTCCCGAGTCGGCCGCCG
CCGAGGCGGAGAACGTGCTGCGCAACGCCGACGCCGCCGCGTCCGGCCCG
ACCGCCCTGGCCGCGCTGACGGCCCTGCTCTACGCCGAGAACACCGACGC
CGCCCAGCTCTGGGCGGACAAGCTGGCCGCGGGCATCGGGGCGGGGGAGG
GGGAGGCCGGCTACGCGGGGCCGCGGACCGTGGCCGCCCTGCGTCGCGGC
GACCTGACCACCGCGGTCCAGGCGGCCGGCGCGGTCCTGGACCGCGGCCG
GCCGTCGTCGCTCGGCATCACCGCCGTGTTGCCGTTGAGCGGCGCGGTCG
CCGCCGCGATCCGGCTGGGCGAGCTCGAGCGGGCCGAGAAGTGGCTGGCC
GAGCCGCTGCCCGAAGCCGTCCACGACAGCCTGTTCGGCCTGCACCTGCT
GATGGCGCGGGGCCGCTACAGCCTCGCGGTGGGCCGGCACGAGGCGGCGT
ACGCCGCGTTCCGGGACTGCGGTGAACGGATGCGCCGGTGGGACGTCGAC
GTGCCCGGGCTGGCCCTGTGGCGGGTGGACGCGGCCGAGGCGCTGCTGCC
CGGCGATGACCGGGCGGAGGGCCGGCGGCTGATCGACGAGCAGCTCACCC
GGCCGATGGGGCCCCGGTCACGAGCCCTGACCCTGCGGGTACGAGCGGCC
TACGCCCCGCCGGCGAAACGGATCGACCTGCTCGACGAAGCGGCCGACCT
GCTGCTCTCCAGCAACGACCAGTACGAGCGGGCACGGGTGCTGGCCGACC
TGAGCGAGGCGTTCAGCGCGCTCCGGCAGAACGGCCGGGCGCGCGGCATC
CTGCGGCAGGCCCGGCACCTGGCCGCCCAGTGCGGGGCGGTCCCCCTGCT
GCGCCGGCTGGGCGTCAAGGCCGGCCGGTCCGGTCGGCTCGGCCGGCCGC
CGCAGGGAATCCGCTCCCTGACCGAGGCCGAGCGCCGGGTGGCCACGCTG
GCCGCCGCCGGGCAGACCAACCGGGAGATCGCCGACCAGCTCTTCGTCAC
CGCCAGCACGGTCGAGCAGCACCTCACCAACGTGTTCCGCAAGCTCGGCG
TGAAGGGCCGCCAGCAATTGCCGGCCGAGCTGGCCGACCTGCGGCCGCCG
GGCTGA

SEQ ID NO: 187

ATGGAGTTTTACGACCTGGTCGCCCGCGATGACGAGCTCAGAAGGTTGGA
CCAGGCCCTCGGCCGCGCCGCCGGCGGACGGGGTGTCGTGGTCACCGTCA
CCGGACCGGTCGGCTGCGGCAAGACCGAACTGCTGGACGCGGCCGCGGCC
GAGGAGGAATTCATCACGTTGCGTGCGGTCTGCTCGGCCGAGGAGCGGGC
CCTGCCGTACGCCGTGATCGGCCAACTCCTCGACCATCCCGTACTCTCCG
CACGCGCGCCCGACCTGGCCTGCGTGACGGCTCCGGGCCGGACGCTGCCG
GCCGACACCGAGAACCGCCTGCGCCGCGACCTCACCCGGGCCCTGCTGGC
CCTGGCCTCCGAACGACCGGTTCTGATCTGCATCGACGACGTGCACCAGG
CCGACACCGCCTCGCTGAACTGCCTGCTGCACCTGGCCCGGCGGGTCGCC
TCGGCCCGGATCGCCATGATCCTCACCGAGTTGCGCCGGCTCACCCCGGC
TCACTCCCGGTTCGAGGCGGAACTGCTCAGCCTGCGGCACCGCCACGAGA
TCGCGCTGCGTCCCCTCGGCCCGGCCGACACCGCCGAACTGGCCCGCGCC
CGGCTCGGCGCCGGCGTCACCGCCGACGAGCTGGCCCAGGTCCACGAGGC
CACCAGCGGGAACCCCAACCTGGTCGGAGGCCTGGTCAACGACGTGCGAG
AGGCCTGGGCGGCCGGTGGCACGGGCATTGCGGCGGGGCGGGCGTACCGG
CTGGCGTACCTCAGCTCCGTGTACCGCTGTGGTCCGGTCCCGTTGCGGAT
CGCCCAGGCGGCGGCGGTGCTGGGTCCCAGCGCCACCGTCACGCTGGTGC
GCCGGATCAGCGGGCTCGACGCCGAGACGGTGGACGAGGCGACCGCGATC
CTCACCGAGGGCGGCCTGCTCCGGGACCACCGGTTCCCGCATCCGGCGGC
CCGCTCGGTCGTACTCGACGACATGTCCGCGCAGGAACGCCGCCGCCTGC
ACCGGTCCACGCTGGACGTGCTGGACGGCGTACCCGTCGACGTGCTCGCG
CACCACCAGGCCGGCGCCGGTCTGCTGCACGGCCCGCAGGCGGCCGAGAT
GTTCGCCCGGGCCAGCCAGGAGCTGCGGGTACGCGGCGAGCTGGACGCCG
CGACCGAGTACCTGCAACTGGCCTACCGGGCCTCCGACGACGCCGGCGCC
CGGGCCGCCCTGCAGGTGGAGACCGTGGCCGGCGAGCGCCGCCGCAACCC
GCTGGCCGCCAGCCGGCACCTGGACGAGCTGGCCGCCGCCGCCCGGGCCG
GCCTGCTGTCGGCCGAGCACGCCGCCCTGGTCGTGCACTGGCTGGCCGAC
GCCGGACGACCCGGCGAGGCCGCCGAGGTGCTGGCGCTGCAGCGGGCGCT
GGCCGTCACCGACCACGACCGGGCCCGCCTGCGGGCGGCCGAGGTGTCGC
TCGCGCTGTTCCACCCCGGCGTCCCCGGTTCGGACCCGCGGCCCCTCGCG
CCGGAGGAGCTCGCGAGCCTGTCCCTGTCGGCCCGGCACGGTGTGACCGC
CGACAACGCGGTGCTGGCGGCGCTGCGCGGCCGTCCCGAGTCGGCCGCCG
CCGAGGCGGAGAACGTGCTGCGCAACGCCGACGCCGCCGCGTCCGGCCCG
ACCGCCCTGGCCGCGCTGACGGCCCTGCTCTACGCCGAGAACACCGACGC
CGCCCAGCTCTGGGCGGACAAGCTGGCCGCGGGCATCGGGGCGGGGGAGG
GGGAGGCCGGCTACGCGGGGCCGCGGACCGTGGCCGCCCTGCGTCGCGGC
GACCTGACCACCGCGGTCCAGGCGGCCGGCGCGGTCCTGGACCGCGGCCG
GCCGTCGTCGCTCGGCATCACCGCCGTGTTGCCGTTGAGCGGCGCGGTCG
CCGCCGCGATCCGGCTGGGCGAGCTCGAGCGGGCCGAGAAGTGGCTGGCC
GAGCCGCTGCCCGAAGCCGTCCACGACAGCCTGTTCGGCCTGCACCTGCT
GATGGCGCGGGGCCGCTACAGCCTCGCGGTGGGCCGGCACGAGGCGGCGT
ACGCCGCGTTCCGGGACTGCGGTGAACGGATGCGCCGGTGGGACGTCGAC
GTGCCCGGGCTGGCCCTGTGGCGGGTGGACGCGGCCGAGGCGCTGCTGCC
CGGCGATGACCGGGCGGAGGGCCGGCGGCTGATCGACGAGCAGCTCACCC
GGCCGATGGGGCCCCGGTCACGAGCCCTGACCCTGCGGGTACGAGCGGCC
TACGCCCCGCCGGCGAAACGGATCGACCTGCTCGACGAAGCGGCCGACCT
GCTGCTCTCCAGCAACGACCAGTACGAGCGGGCACGGGTGCTGGCCGACC
TGAGCGAGGCGTTCAGCGCGCTCCGGCAGAACGGCCGGGCGCGCGGCATC
CTGCGGCAGGCCCGGCACCTGGCCGCCCAGTGCGGGGCGGTCCCCCTGCT
GCGCCGGCTGGGCGTCAAGGCCGGCCGGTCCGGTCGGCTCGGCCGGCCGC
CGCAGGGAATCCGCTCCCTGACCGAGGCCGAGCGCCGGGTGGCCACGCTG
GCCGCCGCCGGGCAGACCAACCGGGAGATCGCCGACCAGCTCTTCGTCAC
CGCCAGCACGGTCGAGCAGCACCTCACCAACGTGTTCCGCAAGCTCGGCG
TGAAGGGCCGCCAGCAATTGCCGGCCGAGCTGGCCGACCTGCGGCCGCCG
GGCTGA

SEQ ID NO: 188

GTGGTCACCGTCACCGGCCCAATCGCCTGCGGCAAGACAGAACTGCTTGA
CGCGGCTGCCGCGAAGGCTGAGGCCATCATTCTGCGCGCGGTCTGCGCGC
CAGAAGAGCGGGCTATGCCGTACGCCATGATCGGGCAGCTCATCGACGAC
CCGGCGCTCGCGCATCGGGCGCCGGGGCTGGCTGATCGGATAGCCCAGGG
CGGGCAGCTGTCGCTGAGGGCCGAGAACCGACTGCGCAGGGATCTCACCC
GTGCCCTGCTGGCGCTTGCCGTCGACCGGCCTGTGCTGATCGGCGTCGAC
GATGTGCATCACGCCGACACCGCCTCTTTGAACTGTCTGCTGCATTTGGC
GCGCCGGGTCCGTCCGGCCCGGATATCCATGATCTTCACCGAGTTGCGCA
GCCTCACCCCTACTCAGTCACGGTTCAAGGCGGAGCTGCTCAGCCTGCCG
TACCACCACGAGATCGCGCTGCGTCCGTTCGGACCGGAGCAATCGGCGGA
GCTGGCCCGCGCCGCCTTCGGCCCGGGCCTCGCCGAGGATGTGCTCGTGG
GGTTGTATAAAACGACCAGGGGCAATCTGAGTCTCAGCCGTGGACTGATC
AGCGATGTGCGGGAGGCCCTGGCCAACGGAGAGAGCGCCTTCGAGGCGGG
CCGCGCGTTCCGGCTGGCGTACCTCGGCTCGCTCTACCGCTGTGGCCCGG
TCGCGCTGCGGGTCGCCCGAGTGGCTGCCGTGCTGGGCCCGAGCGCCACC
ACCACGCTGGTGCGCCGTCTAAGCGGGCTCAGCGCGGAGACGATAGACCG
GGCAACCAAGATCCTCACCGAGGGCGGGCTGCTGCTCGACCAGCAGTTCC
CGCACCCGGCCGCCCGCTCGGTGGTGCTTGATGACATGTCCGCCCAGGAA
CGACGCGGCCTGCACACTCTCGCCCTGGAACTGCTGGACGAGGCGCCGGT
TGAAGTGCTCGCGCACCACCAGGTCGGCGCCGGTCTCATACACGGGCCCA
AGGCTGCGGAGATGTTCGCCAAGGCCGGCAAGGCTCTGGTCGTACGCAAC
GAGTTGGGCGACGCGGCAGAATACCTGCAACTGGCTCACCGGGCCTCCGA
CGATGTCTCCACCCGGGCCGCCTTACGGGTCGAGGCCGTGGCGATCGAGC
GCCGCCGCAATCCGCTGGCCTCCAGTCGGCACATGGACGAGCTGAGCGCC
GCCGGCCGCGCCGGTCTGCTTTCCCCCAAGCATGCGGCGCTGGCCGTCTT
CTGGCTGGCCGACGGCGGGCGATCCGGCGAGGCAGCCGAGGTGCTGGCGT
CGGAACGCCCGCTAGCGACCACCGATCAGAACCGGGCCCACTTGCGATTT
GTCGAGGTGACTCTCGCGCTGTTCTCTCCCGGCGCCTTCGGATCGGACCG
GCGCCCACCTCCGCTGACGCCGGACGAACTCGCCAGCCTGCCGAAGGCGG
CCTGGCAATGCGCGGTCGCCGACAACGCGGCCATGACCGCCTTGCACGGT
CATCCAGAACTTGCCACCGCTCAGGCGGAAACAGTTCTGCGGCAGGCTGA
TTCGGCAGCCGACGCGATCCCCGCCGCGCTGATCGCCCTGTTGTACGCGG
AGAACACCGAGTCCGCTCATATCTGGGCCGACAAGCTGGGCAGCACGAAT
GGCGGGGTATCGAACGAGGCGGAAGCGGGCTACGCCGGCCCGTGCGCCGA
GATCGCCCTGCGGCGCGGCGACCTGGCCACGGCGTTCGAGGCTGGTAGCA
CCGTCCTGGACGACCGGTCGCTGCCGTCGCTCGGCATCACCGCCGCATTG
CTGTTGAGCAGCAAGACGGCCGCCGCTGTCCGGCTGGGCGAACTCGAGCG
TGCGGAGAAGCTGCTCGCCGAGCCGCTTCCGAACGGCGTCCAGGACAGCC
TTTTCGGTCTGCACCTGCTCTCGGCATACGGCCAGTACAGCCTCGCGATG
GGCCGATATGAATCGGCTCTCCGGGCGTTTCACACCTGCGGAGAACGTAT
GCGCAGCTGGGATGTTGACGTGCCTGGTCTGGCCCTGTGGCGTGTCGACG
CCGCCGAGGCGCTGCTCAGCCTCGACCGGAACGAGGGCCAGCGGCTCATC
GACGAACAACTCACCCGTCCGATGGGGCCTCGTTCCCGCGCGTTAACGCT
GCGGATCAAGGCGGCATACCTCCCGCGGACGAAGCGGATCCCCCTGCTCC
ATGAGGCGGCCGAGCTGCTGCTCCCCTGCCCCGACCCGTACGAGCAAGCG
CGGGTGCTCGCCGATCTGGGCGACACGCTCAGCGCGCTCAGACGCTATAG
CCGGGCGCGGGGAGTTCTCCGGCAGGCTCGTCACCTGGCCGCCCAGTGCG
GTGCTGTCCCGCTGCTGCGCAGGCTCGGGGGCGAGCCCGGCCGGATCGAC
GACGCCGGCCTGCCGCAGCGGAGCACATCGTTGACCGATGCGGAGCGGCG
GGTGGCGGCGCTGGCCGCGGCCGGACAGACCAACCGGGAGATCGCCAAAC
AGCTGTTCGTCACGGCCAGCACAGTGGAACAGCACCTCACAAGCGTCTTC
CGCAAACTGGGGGTCAAGGGTCGCAAGCAGCTGCCGACCGCGCTGGCCGA
CGTGGAACAGACCTGA

SEQ ID NO: 189

ATGTATAGCGGTACCTGCCGTGAAGGATACGAACTCGTCGCACGCGAGGA
CGAACTCGGCATTCTACAGAGGTCTCTGGAACAAGCGAGCAGCGGCCAGG
GCGTCGTGGTCACCGTCACCGGCCCAATCGCCTGCGGCAAGACAGAACTG
CTTGACGCGGCTGCCGCGAAGGCTGAGGCCATCATTCTGCGCGCGGTCTG
CGCGCCAGAAGAGCGGGCTATGCCGTACGCCATGATCGGGCAGCTCATCG
ACGACCCGGCGCTCGCGCATCGGGCGCCGGGGCTGGCTGATCGGATAGCC
CAGGGCGGGCAGCTGTCGCTGAGGGCCGAGAACCGACTGCGCAGGGATCT
CACCCGTGCCCTGCTGGCGCTTGCCGTCGACCGGCCTGTGCTGATCGGCG
TCGACGATGTGCATCACGCCGACACCGCCTCTTTGAACTGTCTGCTGCAT
TTGGCGCGCCGGGTCCGTCCGGCCCGGATATCCATGATCTTCACCGAGTT
GCGCAGCCTCACCCCTACTCAGTCACGGTTCAAGGCGGAGCTGCTCAGCC
TGCCGTACCACCACGAGATCGCGCTGCGTCCGTTCGGACCGGAGCAATCG
GCGGAGCTGGCCCGCGCCGCCTTCGGCCCGGGCCTCGCCGAGGATGTGCT
CGTGGGGTTGTATAAAACGACCAGGGGCAATCTGAGTCTCAGCCGTGGAC
TGATCAGCGATGTGCGGGAGGCCCTGGCCAACGGAGAGAGCGCCTTCGAG
GCGGGCCGCGCGTTCCGGCTGGCGTACCTCGGCTCGCTCTACCGCTGTGG
CCCGGTCGCGCTGCGGGTCGCCCGAGTGGCTGCCGTGCTGGGCCCGAGCG
CCACCACCACGCTGGTGCGCCGTCTAAGCGGGCTCAGCGCGGAGACGATA
GACCGGGCAACCAAGATCCTCACCGAGGGCGGGCTGCTGCTCGACCAGCA
GTTCCCGCACCCGGCCGCCCGCTCGGTGGTGCTTGATGACATGTCCGCCC
AGGAACGACGCGGCCTGCACACTCTCGCCCTGGAACTGCTGGACGAGGCG
CCGGTTGAAGTGCTCGCGCACCACCAGGTCGGCGCCGGTCTCATACACGG
GCCCAAGGCTGCGGAGATGTTCGCCAAGGCCGGCAAGGCTCTGGTCGTAC
GCAACGAGTTGGGCGACGCGGCAGAATACCTGCAACTGGCTCACCGGGCC
TCCGACGATGTCTCCACCCGGGCCGCCCTGCGGGTCGAGGCCGTGGCGAT
CGAGCGCCGCCGCAATCCGCTGGCCTCCAGTCGGCACATGGACGAGCTGA
GCGCCGCCGGCCGCGCCGGTCTGCTTTCCCCCAAGCATGCGGCGCTGGCC
GTCTTCTGGCTGGCCGACGGCGGGCGATCCGGCGAGGCAGCCGAGGTGCT
GGCGTCGGAACGCCCGCTAGCGACCACCGATCAGAACCGGGCCCACTTGC
GATTTGTCGAGGTGACTCTCGCGCTGTTCTCTCCCGGCGCCTTCGGATCG
GACCGGCGCCCACCTCCGCTGACGCCGGACGAACTCGCCAGCCTGCCGAA
GGCGGCCTGGCAATGCGCGGTCGCCGACAACGCGGCCATGACCGCCTTGC
ACGGTCATCCAGAACTTGCCACCGCTCAGGCGGAAACAGTTCTGCGGCAG
GCTGATTCGGCAGCCGACGCGATCCCCGCCGCGCTGATCGCCCTGTTGTA
CGCGGAGAACACCGAGTCCGCTCATATCTGGGCCGACAAGCTGGGCAGCA
CGAATGGCGGGGTATCGAACGAGGCGGAAGCGGGCTACGCCGGCCCGTGC
GCCGAGATCGCCCTGCGGCGCGGCGACCTGGCCACGGCGTTCGAGGCTGG
TAGCACCGTCCTGGACGACCGGTCGCTGCCGTCGCTCGGCATCACCGCCG
CATTGCTGTTGAGCAGCAAGACGGCCGCCGCTGTCCGGCTGGGCGAACTC
GAGCGTGCGGAGAAGCTGCTCGCCGAGCCGCTTCCGAACGGCGTCCAGGA
CAGCCTTTTCGGTCTGCACCTGCTCTCGGCATACGGCCAGTACAGCCTCG
CGATGGGCCGATATGAATCGGCTCTCCGGGCGTTTCACACCTGCGGAGAA
CGTATGCGCAGCTGGGATGTTGACGTGCCTGGTCTGGCCCTGTGGCGTGT
CGACGCCGCCGAGGCGCTGCTCAGCCTCGACCGGAACGAGGGCCAGCGGC
TCATCGACGAACAACTCACCCGTCCGATGGGGCCTCGTTCCCGCGCGCTG
ACGCTGCGGATCAAGGCGGCATACCTCCCGCGGACGAAGCGGATCCCCCT
GCTCCATGAGGCGGCCGAGCTGCTGCTCCCCTGCCCCGACCCGTACGAGC
AAGCGCGGGTGCTCGCCGATCTGGGCGACACGCTCAGCGCGCTCAGACGC
TATAGCCGGGCGCGGGGAGTTCTCCGGCAGGCTCGTCACCTGGCCGCCCA
GTGCGGTGCTGTCCCGCTGCTGCGCAGGCTCGGGGGCGAGCCCGGCCGGA
TCGACGACGCCGGCCTGCCGCAGCGGAGCACATCGTTGACCGATGCGGAG
CGGCGGGTGGCGGCGCTGGCCGCGGCCGGACAGACCAACCGGGAGATCGC
CAAACAGCTGTTCGTCACGGCCAGCACAGTGGAACAGCACCTCACAAGCG
TCTTCCGCAAACTGGGGGTCAAGGGTCGCAAGCAGCTGCCGACCGCGCTG
GCCGACGTGGAACAGACCTGA

SEQ ID NO: 190

ATGCCTGCCGTGGAGAGCTATGAACTGGACGCCCGCGATGACGAGCTCAG
AAGACTGGAGGAGGCGGTAGGCCAGGCGGGCAACGGCCGGGGTGTGGTGG
TCACCATCACCGGGCCGATCGCCTGCGGCAAGACCGAACTGCTCGACGCG
GCCGCCGCGAAGAGCGACGCCATCACATTACGTGCGGTCTGCTCCGAGGA
GGAACGGGCCCTCCCGTACGCCCTGATCGGGCAGCTCATCGACAACCCGG
CGGTCGCCTCCCAGCTGCCGGATCCGGTCTCCATGGCCCTCCCGGGCGAG
CACCTGTCGCCGGAGGCCGAGAACCGGCTGCGCGGCGACCTCACCCGTAC
CCTGCTGGCGCTCGCCGCCGAACGGCCGGTGCTGATCGGCATCGACGACA
TGCACCACGCCGACACCGCCTCTTTGAACTGCCTGCTCCACCTGGCCCGG
AGGGTCGGCCCGGCCCGGATCGCCATGGTCCTCACCGAGCTGCGCCGGCT
CACCCCGGCCCACTCCCAGTTCCACGCCGAGCTGCTCAGCCTGGGGCACC
ACCGCGAGATCGCGCTGCGCCCGCTCGGCCCGAAGCACATCGCCGAGCTG
GCCCGCGCCGGCCTCGGTCCCGATGTCGACGAGGACGTGCTCACGGGGTT
GTACCGGGCGACCGGCGGCAACCTGAACCTCGGCCACGGACTGATCAAGG
ATGTGCGGGAGGCCTGGGCGACGGGCGGGACGGGCATCAACGCGGGCCGC
GCGTACCGGCTGGCGTACCTCGGTTCCCTCTACCGCTGCGGCCCGGTCCC
GTTGCGGGTCGCACGGGTGGCCGCCGTGCTGGGCCAGAGCGCCAACACCA
CCCTGGTGCGCTGGATCAGCGGGCTCAACGCGGACGCGGTGGGCGAGGCG
ACCGAGATCCTCACCGAGGGCGGCCTGCTGCACGACCTGCGGTTCCCGCA
TCCGGCGGCCCGTTCGGTCGTACTCAACGACCTGTCCGCCCGGGAACGCC
GCCGACTGCACCGGTCCGCTCTGGAAGTGCTGGATGACGTACCCGTTGAA
GTGGTCGCGCACCACCAGGCCGGTGCCGGTTTCATCCACGGTCCCAAGGC
CGCCGAGATCTTCGCCAAGGCCGGCCAGGAGCTGCATGTGCGCGGCGAGC
TGGACGCCGCGTCCGACTATCTGCAACTGGCCCACCACGCCTCCGACGAC
GCCGTCACCCGGGCCGCGCTGCGGGTCGAGGCCGTGGCGATCGAGCGCCG
CCGCAACCCGCTGGCCTCCAGCCGCCACCTCGACGAGCTGACCGTCGCCG
CCCGTGCCGGTCTGCTCTCCCTCGAGCACGCCGCGCTGATGATCCGCTGG
CTGGCTCTCGGCGGGCGGTCCGGCGAGGCGGCCGAGGTGCTGGCCGCGCA
GCGCCCGCGTGCGGTCACCGACCAGGACAGGGCCCACCTGCGGGCCGCCG
AGGTATCGCTGGCGCTGGTCAGCCCGGGCGCGTCCGGCGTCAGCCCGGGT
GCGTCCGGCCCGGATCGGCGGCCGCGTCCGCTCCCGCCGGATGAGCTCGC
GAACCTGCCGAAGGCGGCCCGGCTTTGTGCGATCGCCGACAACGCCGTCA
TATCGGCCCTGCACGGTCGTCCCGAGCTTGCCTCGGCCGAGGCGGAGAAC
GTCCTGAAGCAGGCTGACTCGGCGGCGGACGGCGCCACCGCCCTCTCCGC
GCTGACGGCCTTGCTGTACGCGGAGAACACCGACACCGCTCAGCTCTGGG
CCGACAAGCTCGTCTCCGAGACCGGGGCGTCGAACGAGGAGGAAGGCGCG
GGCTACGCGGGGCCGCGCGCCGAGACCGCGTTGCGCCGCGGCGACCTGGC
CGCGGCGGTCGAGGCGGGCAGCGCCATTCTGGACCACCGGCGGGGGTCGT
TGCTCGGCATCACCGCCGCGCTACCGCTGAGCAGCGCGGTAGCCGCCGCC
ATCCGGCTGGGCGAGACCGAGCGGGCGGAGAAGTGGCTCGCCGAGCCGCT
GCCGGAGGCCATTCGGGACAGCCTGTTCGGGCTGCACCTGCTCTCGGCGC
GCGGCCAGTACTGCCTCGCGACGGGCCGGCACGAGTCGGCGTACACGGCG
TTCCGCACCTGCGGGGAACGGATGCGGAACTGGGGCGTCGACGTGCCGGG
TCTGTCCCTGTGGCGCGTCGACGCCGCCGAGGCGCTGCTGCACGGCCGCG
ACCGGGACGAGGGCCGACGGCTCATCGACGAGCAGCTCACCCATGCGATG
GGACCCCGTTCCCGCGCTTTGACGCTGCGGGTGCAGGCGGCGTACAGCCC
GCAGGCGCAGCGGGTCGACCTGCTCGAAGAGGCGGCCGACCTGCTGCTCT
CCTGCAACGACCAGTACGAGCGGGCGCGGGTGCTCGCCGATCTGAGCGAG
GCGTTCAGCGCGCTCAGGCACCACAGCCGGGCGCGGGGACTGCTCCGGCA
GGCCCGGCACCTGGCCGCCCAGTGCGGCGCGACCCCGCTGCTGCGCCGGC
TCGGGGCCAAGCCCGGAGGCCCCGGCTGGCTGGAGGAATCCGGCCTGCCG
CAGCGGATCAAGTCGCTGACCGACGCGGAGCGGCGGGTGGCGTCGCTGGC
CGCCGGCGGCCAGACCAACCGCGTGATCGCCGACCAGCTCTTCGTCACGG
CCAGCACGGTGGAGCAGCACCTCACGAACGTCTTCCGCAAGCTGGGCGTC
AAGGGCCGCCAGCACCTGCCGGCCGAACTCGCCAACGCGGAATAG

SEQ ID NO: 191

ATGCCTGCCGTGGAGAGCTATGAACTGGACGCCCGCGATGACGAGCTCAG
AAGACTGGAGGAGGCGGTAGGCCAGGCGGGCAACGGCCGGGGTGTGGTGG
TCACCATCACCGGGCCGATCGCCTGCGGCAAGACCGAACTGCTCGACGCG
GCCGCCGCGAAGAGCGACGCCATCACACTGCGTGCGGTCTGCTCCGAGGA
GGAACGGGCCCTCCCGTACGCCCTGATCGGGCAGCTCATCGACAACCCGG
CGGTCGCCTCCCAGCTGCCGGATCCGGTCTCCATGGCCCTCCCGGGCGAG
CACCTGTCGCCGGAGGCCGAGAACCGGCTGCGCGGCGACCTCACCCGTAC
CCTGCTGGCGCTCGCCGCCGAACGGCCGGTGCTGATCGGCATCGACGACA
TGCACCACGCCGACACCGCCTCTTTGAACTGCCTGCTCCACCTGGCCCGG
AGGGTCGGCCCGGCCCGGATCGCCATGGTCCTCACCGAGCTGCGCCGGCT
CACCCCGGCCCACTCCCAGTTCCACGCCGAGCTGCTCAGCCTGGGGCACC
ACCGCGAGATCGCGCTGCGCCCGCTCGGCCCGAAGCACATCGCCGAGCTG
GCCCGCGCCGGCCTCGGTCCCGATGTCGACGAGGACGTGCTCACGGGGTT
GTACCGGGCGACCGGCGGCAACCTGAACCTCGGCCACGGACTGATCAAGG
ATGTGCGGGAGGCCTGGGCGACGGGCGGGACGGGCATCAACGCGGGCCGC
GCGTACCGGCTGGCGTACCTCGGTTCCCTCTACCGCTGCGGCCCGGTCCC
GTTGCGGGTCGCACGGGTGGCCGCCGTGCTGGGCCAGAGCGCCAACACCA
CCCTGGTGCGCTGGATCAGCGGGCTCAACGCGGACGCGGTGGGCGAGGCG
ACCGAGATCCTCACCGAGGGCGGCCTGCTGCACGACCTGCGGTTCCCGCA
TCCGGCGGCCCGTTCGGTCGTACTCAACGACCTGTCCGCCCGGGAACGCC
GCCGACTGCACCGGTCCGCTCTGGAAGTGCTGGATGACGTACCCGTTGAA
GTGGTCGCGCACCACCAGGCCGGTGCCGGTTTCATCCACGGTCCCAAGGC
CGCCGAGATCTTCGCCAAGGCCGGCCAGGAGCTGCATGTGCGCGGCGAGC
TGGACGCCGCGTCCGACTATCTGCAACTGGCCCACCACGCCTCCGACGAC
GCCGTCACCCGGGCCGCGCTGCGGGTCGAGGCCGTGGCGATCGAGCGCCG
CCGCAACCCGCTGGCCTCCAGCCGCCACCTCGACGAGCTGACCGTCGCCG
CCCGTGCCGGTCTGCTCTCCCTCGAGCACGCCGCGCTGATGATCCGCTGG
CTGGCTCTCGGCGGGCGGTCCGGCGAGGCGGCCGAGGTGCTGGCCGCGCA
GCGCCCGCGTGCGGTCACCGACCAGGACAGGGCCCACCTGCGGGCCGCCG
AGGTATCGCTGGCGCTGGTCAGCCCGGGCGCGTCCGGCGTCAGCCCGGGT
GCGTCCGGCCCGGATCGGCGGCCGCGTCCGCTCCCGCCGGATGAGCTCGC
GAACCTGCCGAAGGCGGCCCGGCTTTGTGCGATCGCCGACAACGCCGTCA
TATCGGCCCTGCACGGTCGTCCCGAGCTTGCCTCGGCCGAGGCGGAGAAC
GTCCTGAAGCAGGCTGACTCGGCGGCGGACGGCGCCACCGCCCTCTCCGC
GCTGACGGCCTTGCTGTACGCGGAGAACACCGACACCGCTCAGCTCTGGG
CCGACAAGCTCGTCTCCGAGACCGGGGCGTCGAACGAGGAGGAAGGCGCG
GGCTACGCGGGGCCGCGCGCCGAGACCGCGTTGCGCCGCGGCGACCTGGC
CGCGGCGGTCGAGGCGGGCAGCGCCATTCTGGACCACCGGCGGGGGTCGT
TGCTCGGCATCACCGCCGCGCTACCGCTGAGCAGCGCGGTAGCCGCCGCC
ATCCGGCTGGGCGAGACCGAGCGGGCGGAGAAGTGGCTCGCCGAGCCGCT
GCCGGAGGCCATTCGGGACAGCCTGTTCGGGCTGCACCTGCTCTCGGCGC
GCGGCCAGTACTGCCTCGCGACGGGCCGGCACGAGTCGGCGTACACGGCG
TTCCGCACCTGCGGGGAACGGATGCGGAACTGGGGCGTCGACGTGCCGGG
TCTGTCCCTGTGGCGCGTCGACGCCGCCGAGGCGCTGCTGCACGGCCGCG
ACCGGGACGAGGGCCGACGGCTCATCGACGAGCAGCTCACCCATGCGATG
GGACCCCGTTCCCGCGCTTTGACGCTGCGGGTGCAGGCGGCGTACAGCCC
GCAGGCGCAGCGGGTCGACCTGCTCGAAGAGGCGGCCGACCTGCTGCTCT
CCTGCAACGACCAGTACGAGCGGGCGCGGGTGCTCGCCGATCTGAGCGAG
GCGTTCAGCGCGCTCAGGCACCACAGCCGGGCGCGGGGACTGCTCCGGCA
GGCCCGGCACCTGGCCGCCCAGTGCGGCGCGACCCCGCTGCTGCGCCGGC
TCGGGGCCAAGCCCGGAGGCCCCGGCTGGCTGGAGGAATCCGGCCTGCCG
CAGCGGATCAAGTCGCTGACCGACGCGGAGCGGCGGGTGGCGTCGCTGGC
CGCCGGCGGCCAGACCAACCGCGTGATCGCCGACCAGCTCTTCGTCACGG
CCAGCACGGTGGAGCAGCACCTCACGAACGTCTTCCGCAAGCTGGGCGTC
AAGGGCCGCCAGCACCTGCCGGCCGAACTCGCCAACGCGGAATAG

SEQ ID NO: 192

GTGAAGCGCAACGATCTGGTTGCCCGCGATGGCGAGCTCAGGTGGATGCA
AGAGATTCTCAGTCAGGCGAGCGAGGGCCGGGGGGCCGTGGTCACCATCA
CGGGGGCGATCGCCTGTGGCAAGACGGTGCTGCTGGACGCCGCGGCAGCC
AGTCAAGACGTGATCCAACTGCGTGCGGTCTGCTCGGCGGAGGAGCAGGA
GCTGCCGTACGCGATGGTCGGACAACTACTCGACAATCCGGTGCTCGCCG
CGCGAGTGCCGGCCCTGGGCAACCTGGCTGCGGCGGGCGAGCGGCTGCTG
CCGGGCACCGAGAACAGGATCCGGCGGGAGCTCACCCGCACCCTGCTGGC
TCTCGCCGACGAACGACCGGTGCTGATCGGCGTCGACGACATGCACCATG
CGGACCCCGCCTCGCTGGACTGCCTGCTGCACCTGGCCCGGCGGGTCGGC
CCGGCCCGCATCGCGATCGTTCTGACCGAGTTGCGCCGGCTCACCCCGGC
TCACTCGCGCTTCCAGTCCGAGCTGCTCAGCCTGCGGTACCACCACGAGA
TCGGGTTGCAGCCGCTCACCGCGGAGCACACCGCCGACCTGGCCCGCGTC
GGCCTCGGTGCCGAGGTCGACGACGACGTGCTCACCGAGCTCTACGAGGC
GACCGGCGGCAACCCGAGTCTGTGCTGCGGCCTGATCAGGGACGTGCGGC
AGGACTGGGAGGCCGGGGTCACCGGTATCCACGTCGGCCGGGCGTACCGG
CTGGCCTATCTCAGTTCGCTCTACCGCTGCGGCCCGGCGGCGCTGCGGAC
CGCCCGCGCGGCCGCGGTGCTGGGCGACAGCGCCGACGCCTGCCTGATCC
GCCGGGTCAGCGGCCTCGGTACGGAGGCCGTGGGCCAGGCGATCCAGCAG
CTCACCGAGGGCGGCCTGCTGCGTGACCAGCAGTTCCCGCACCCGGCGGC
CCGCTCGGTCGTGCTCGACGACATGTCCGCGCAGGAACGCCACGCGATGT
ATCGCAGCGCCCGGGAGGCAGCCGCCGAAGGTCAGGCCGACCCCGGCACC
CCGGGCGAGCCGCGGGCGGCTACGGCGTACGCCGGGTGTGGTGAGCAAGC
CGGTGACTACCCGGAGCCGGCCGGCCGGGCCTGCGTGGACGGTGCCGGTC
CGGCCGAGTACTGCGGCGACCCGCACGGCGCCGACGACGACCCGGACGAG
CTGGTCGCCGCGCTGGGCGGGCTGCTGCCGAGCCGGCTCGTGGCGATGAA
GATCCGGCGCCTGGCGGTGGCCGGGCGCCCCGGGGCGGCTGCCGAGCTGC
TGACCTCGCAGCGGTTGCACGCGGTGACCAGCGAGGACCGGGCCAGCCTG
CGGGCCGCCGAGGTGGCGCTCGCCACGCTGTGGCCGGGTGCGACCGGCCC
GGACCGGCATCCGCTCACGGAGCAGGAGGCGGCGAGCCTGCCGGAGGGTC
CGCGCCTGCTCGCTGCCGCCGACGATGCCGTCGGGGCCGCCCTGCGCGGT
CGCGCCGAGTACGCCGCGGCCGAGGCGGAGAACGTCCTGCGGCACGCCGA
TCCGGCAGCCGGTGGTGACGCCTACGCCGCCATGATCGCCCTGCTGTACA
CGGAGCACCCCGAGAACGTGCTGTTCTGGGCCGACAAGCTCGACGCGGGC
CGCCCCGACGAGGAGACCAGTTATCCCGGGCTGCGGGCCGAGACCGCGGT
GCGGCTCGGTGACCTGGAAACGGCGATGGAGCTGGGCCGCACGGTGCTGG
ACCAGCGGCGGCTGCCGTCCCTGGGTGTCGCCGCGGGCCTGCTCCTGGGC
GGCGCGGTGACGGCCGCCATCCGGCTCGGCGACCTCGACCGGGCGGAGAA
GTGGCTCGCCGAGCCGATCCCCGACGCCATCCGTACCAGCCTCTACGGCC
TGCACGTGCTGGCCGCGCGGGGCCGGCTCGACCTGGCCGCGGGCCGCTAC
GAGGCGGCGTACACGGCGTTCCGGCTGTGTGGCGAGCGGATGGCAGGCTG
GGATGCCGATGTCTCCGGGCTGGCGCTGTGGCGCGTCGACGCCGCCGAGG
CCCTGCTGTCCGCGGGCATCCGCCCGGACGAGGGCCGCAAGCTCATCGAC
GACCAGCTCACCCGTGAGATGGGGGCCCGCTCCCGGGCGCTGACGCTGCG
GGCGCAAGCGGCGTACAGCCTGCCGGTGCACCGGGTGGGCCTGCTCGACG
AGGCGGCCGGCCTGCTGCTCGCCTGCCATGACGGGTACGAGCGGGCGCGG
GTGCTCGCGGACCTGGGGGAGACCCTGCGCACGCTGCGGCACACCGACGC
GGCCCAGCGGGTGCTCCGGCAGGCCGAGCAGGCGGCCGCGCGGTGCGGGT
CGGTCCCGCTGCTGCGGCGGCTCGGGGCCGAACCCGTACGCATCGGCACC
CGGCGTGGTGAACCCGGCCTGCCGCAGCGGATCAGGCTGCTGACCGATGC
CGAGCGGCGGGTTGCCGCGATGGCCGCCGCCGGGCAGACCAACCGGGAGA
TCGCCGGTCGGCTCTTCGTCACGGCCAGCACGGTGGAGCAGCACCTGACC
AGCGTCTTCCGCAAGCTGGGCGTCAAGGGCCGCCGGTTCCTGCCGACCGA
GCTCGCCCAAGCCGTCTGA

SEQ ID NO: 193

ATGCCTGCCGTGAAGCGCAACGATCTGGTTGCCCGCGATGGCGAGCTCAG
GTGGATGCAAGAGATTCTCAGTCAGGCGAGCGAGGGCCGGGGGGCCGTGG
TCACCATCACGGGGGCGATCGCCTGTGGCAAGACGGTGCTGCTGGACGCC
GCGGCAGCCAGTCAAGACGTGATCCAACTGCGTGCGGTCTGCTCGGCGGA
GGAGCAGGAGCTGCCGTACGCGATGGTCGGACAACTACTCGACAATCCGG
TGCTCGCCGCGCGAGTGCCGGCCCTGGGCAACCTGGCTGCGGCGGGCGAG
CGGCTGCTGCCGGGCACCGAGAACAGGATCCGGCGGGAGCTCACCCGCAC
CCTGCTGGCTCTCGCCGACGAACGACCGGTGCTGATCGGCGTCGACGACA
TGCACCATGCGGACCCCGCCTCGCTGGACTGCCTGCTGCACCTGGCCCGG
CGGGTCGGCCCGGCCCGCATCGCGATCGTTCTGACCGAGTTGCGCCGGCT
CACCCCGGCTCACTCGCGCTTCCAGTCCGAGCTGCTCAGCCTGCGGTACC
ACCACGAGATCGGGTTGCAGCCGCTCACCGCGGAGCACACCGCCGACCTG
GCCCGCGTCGGCCTCGGTGCCGAGGTCGACGACGACGTGCTCACCGAGCT
CTACGAGGCGACCGGCGGCAACCCGAGTCTGTGCTGCGGCCTGATCAGGG
ACGTGCGGCAGGACTGGGAGGCCGGGGTCACCGGTATCCACGTCGGCCGG
GCGTACCGGCTGGCCTATCTCAGTTCGCTCTACCGCTGCGGCCCGGCGGC
GCTGCGGACCGCCCGCGCGGCCGCGGTGCTGGGCGACAGCGCCGACGCCT
GCCTGATCCGCCGGGTCAGCGGCCTCGGTACGGAGGCCGTGGGCCAGGCG
ATCCAGCAGCTCACCGAGGGCGGCCTGCTGCGTGACCAGCAGTTCCCGCA
CCCGGCGGCCCGCTCGGTCGTGCTCGACGACATGTCCGCGCAGGAACGCC
ACGCGATGTATCGCAGCGCCCGGGAGGCAGCCGCCGAAGGTCAGGCCGAC
CCCGGCACCCCGGGCGAGCCGCGGGCGGCTACGGCGTACGCCGGGTGTGG
TGAGCAAGCCGGTGACTACCCGGAGCCGGCCGGCCGGGCCTGCGTGGACG
GTGCCGGTCCGGCCGAGTACTGCGGCGACCCGCACGGCGCCGACGACGAC
CCGGACGAGCTGGTCGCCGCGCTGGGCGGGCTGCTGCCGAGCCGGCTCGT
GGCGATGAAGATCCGGCGCCTGGCGGTGGCCGGGCGCCCCGGGGCGGCTG
CCGAGCTGCTGACCTCGCAGCGGTTGCACGCGGTGACCAGCGAGGACCGG
GCCAGCCTGCGGGCCGCCGAGGTGGCGCTCGCCACGCTGTGGCCGGGTGC
GACCGGCCCGGACCGGCATCCGCTCACGGAGCAGGAGGCGGCGAGCCTGC
CGGAGGGTCCGCGCCTGCTCGCTGCCGCCGACGATGCCGTCGGGGCCGCC
CTGCGCGGTCGCGCCGAGTACGCCGCGGCCGAGGCGGAGAACGTCCTGCG
GCACGCCGATCCGGCAGCCGGTGGTGACGCCTACGCCGCCATGATCGCCC
TGCTGTACACGGAGCACCCCGAGAACGTGCTGTTCTGGGCCGACAAGCTC
GACGCGGGCCGCCCCGACGAGGAGACCAGTTATCCCGGGCTGCGGGCCGA
GACCGCGGTGCGGCTCGGTGACCTGGAAACGGCGATGGAGCTGGGCCGCA
CGGTGCTGGACCAGCGGCGGCTGCCGTCCCTGGGTGTCGCCGCGGGCCTG
CTCCTGGGCGGCGCGGTGACGGCCGCCATCCGGCTCGGCGACCTCGACCG
GGCGGAGAAGTGGCTCGCCGAGCCGATCCCCGACGCCATCCGTACCAGCC
TCTACGGCCTGCACGTGCTGGCCGCGCGGGGCCGGCTCGACCTGGCCGCG
GGCCGCTACGAGGCGGCGTACACGGCGTTCCGGCTGTGTGGCGAGCGGAT
GGCAGGCTGGGATGCCGATGTCTCCGGGCTGGCGCTGTGGCGCGTCGACG
CCGCCGAGGCCCTGCTGTCCGCGGGCATCCGCCCGGACGAGGGCCGCAAG
CTCATCGACGACCAGCTCACCCGTGAGATGGGGGCCCGCTCCCGGGCGCT
GACGCTGCGGGCGCAAGCGGCGTACAGCCTGCCGGTGCACCGGGTGGGCC
TGCTCGACGAGGCGGCCGGCCTGCTGCTCGCCTGCCATGACGGGTACGAG
CGGGCGCGGGTGCTCGCGGACCTGGGGGAGACCCTGCGCACGCTGCGGCA
CACCGACGCGGCCCAGCGGGTGCTCCGGCAGGCCGAGCAGGCGGCCGCGC
GGTGCGGGTCGGTCCCGCTGCTGCGGCGGCTCGGGGCCGAACCCGTACGC
ATCGGCACCCGGCGTGGTGAACCCGGCCTGCCGCAGCGGATCAGGCTGCT
GACCGATGCCGAGCGGCGGGTTGCCGCGATGGCCGCCGCCGGGCAGACCA
ACCGGGAGATCGCCGGTCGGCTCTTCGTCACGGCCAGCACGGTGGAGCAG
CACCTGACCAGCGTCTTCCGCAAGCTGGGCGTCAAGGGCCGCCGGTTCCT
GCCGACCGAGCTCGCCCAAGCCGTCTGA

SEQ ID NO: 194

GTGGTCACCGTCACCGGCCCAATCGCCTGCGGCAAGACAGAACTGCTTGA
CGCGGCTGCCGCGAAGGCTGAGGCCATCATTCTGCGCGCGGTCTGCGCGC
CAGAAGAGCGGGCTATGCCGTACGCCATGATCGGGCAGCTCATCGACGAC
CCGGCGCTCGCGCATCGGGCGCCGGGGCTGGCTGATCGGATAGCCCAGGG
CGGGCAGCTGTCGCTGAGGGCCGAGAACCGACTGCGCAGGGATCTCACCC
GTGCCCTGCTGGCGCTTGCCGTGGACCGGCCTGTGCTGATCGGCGTCGAC
GATGTGCATCACGCCGACACCGCCTCTTTGAACTGTCTGCTGCATTTGGC
CCGCCGGGTCCGTCCGGCCCGGATATCCATGATCTTCACCGAGTTGCGCA
GCCTCACCCCTACTCAGTCACGGTTCAAGGCGGAGCTGCTCAGCCTGCCA
TACCACCACGAGATCGCGCTGCGTCCATTCGGACCGGAGCAATCGGCGGA
GCTGGCTCGCGCCGCCTTCGGCCCGGGCCTCGCCGAGGATGTGCTCGCGG
GGTTGTATAAAACGACCAGGGGCAATCTGAGTCTCAGCCGTGGACTGATC
AGCGATGTGCGGGAGGCCCTGGCCAACGGAGAGAGCGCTTTCGAGGCGGG
CCGCGCGTTCCGGCTGGCGTACCTCAGCTCGCTCTACCGCTGTGGCCCGG
TCGCGCTGCGGGTCGCCCGAGTGGCTGCCGTGCTGGGCCCAAGCGCCACC
ACCACGCTGGTGCGCCGGCTAAGCGGGCTCAGCGCGGAGACGATAGACCG
GGCAACCAAGATCCTCACTGAGGGCGGGCTGCTGCTCGACCAGCAGTTCC
CGCACCCGGCCGCCCGCTCGGTGGTGCTCGATGACATGTCCGCCCAGGAA
CGACGCAGCCTGCACACTCTCGCCCTGGAACTGCTGGACGAGGCGCCGGT
TGAAGTGCTCGCGCACCACCAGGTCGGCGCCGGTCTCATACACGGGCCCA
AGGCTGCGGAGATGTTCGCCAAGGCCGGCAAGGCTCTGGTCGTACGCAAC
GAGTTGGGCGACGCGGCCGAATACCTGCAACTGGCTCACCGGGCCTCCGA
CGATGTCTCCACCCGGGCCGCCTTACGGGTCGAGGCCGTGGCCATCGAGC
GCCGCCGCAATCCGCTGGCCTCCAGTCGGCACATGGACGAACTGAGCGCC
GCCGGCCGCGCCGGTCTGCTTTCCCCCAAGCATGCGGCGCTGGCCGTCTT
CTGGCTAGCCGACGGCGGGCGATCCGGCGAGGCAGCCGAAGTGCTGGCGT
CGGAACGCCCGCTCGCGACCACCGATCAGAACCGGGCCCACCTGCGATTT
GTCGAGGTGACTCTCGCGCTGTTCTCTCCCGGCGCCTTCGGATCGGACCG
GCGCCCACCTCCGCTGACGCCGGACGAACTCGCCAGCCTGCCGAAGGCGG
CCTGGCAATGCGCGGTCGCCGACAACGCGGCCATGACCGCCTTGCACGGC
CATCCAGAACTTGCCACCGCTCAGGCGGAAACAGTTCTGCGGCAGGCTGA
TTCGGCAGCCGACGCGATCCCCGCCGCGCTGATCGCCCTGTTGTACGCGG
AGAACACCGAGTCCGCTCATATCTGGGCCGACAAGCTGGGCAGCACGAAT
GCCGGGGTATCGAACGAGGCGGAAGCGGGCTACGCCGGCCCGTGCGCCGA
GATCGCCCTGCGGCGCGGCGACCTGGCCACGGCGTTCGAGGCTGGTAGCG
CCGTCCTGGACGACCGGTCGCTGCCGTCGCTCGGCATCACCGCCGCATTG
CTGTTGAGCAGCAAGACGGCCGCCGCTGTCCGGCTGGGCGAACTCGAGCG
TGCGGAGAAGCTGCTCGCCGAGCCGCTTCCGAACGGCGTCCAGGACAGCC
TTTTCGGTCTGCACCTGCTCTCGGCGTACGGCCAGTACAGCCTCGCGATG
GGCCGATATGAATCAGCTCACCGGGCGTTTCGCACCTGCGGAGAACGTAT
GCGCAGCTGGGATGTTGACGTGCCTGGTCTGGCCCTGTGGCGTGTCGACG
CCGCCGAGGCGCTGCTCAGCCTCGACCGGAACGAGGGCCAGCGGCTCATC
GACGAACAACTCACCCGTCCGATGGGGCCTCGTTCCCACGCGTTAACGCT
GCGGATCAAGGCGGCATACCTCCCGCGGACGAAGCGGATCCCCCTGCTCC
ATGAGGCGGCCGAGCTGCTGCTCCCCTGCCCCGACCCGTACGAGCAAGCG
CGGGTGCTCGCCGATCTGGGCGACACGCTCAGCGCGCTCAGACGCTATAG
CCGGGCGCGGGGAGTTCTCCGGCAGGCTCGTCACCTGGCCACCCAGTGCG
GTGCTGTCCCGCTGCTGCGCAGGCTCGGGGGCGAGCCCGGCCGGATCGAC
GACGCCGGCCTGCCGCAGCGGAGCACATCGTTGACCGATGCGGAGCGGCG
GGTGGCGGCGCTGGCCGCGGCCGGACAGACCAACCGGGAGATCGCCGAAC
AGCTGTTCGTCACGGCCAGCACAGTGGAACAGCACCTCACAAGCGTCTTC
CGCAAGCTGGGCGTCAAGGGCCGCAAGCAGCTGCCGACCGCGCTGGCCGA
CGTGGAACAGACCTGA

SEQ ID NO: 195

ATGTATAGCGGTACCTGCCGTGAAGGATACGAACTCGTCGCACGCGAGGA
CGAACTCGGTATTCTACAGAGGTCTCTGGAACAAGCGAGCAGCGGCCAGG
GCGTCGTGGTCACCGTCACCGGCCCAATCGCCTGCGGCAAGACAGAACTG
CTTGACGCGGCTGCCGCGAAGGCTGAGGCCATCATTCTGCGCGCGGTCTG
CGCGCCAGAAGAGCGGGCTATGCCGTACGCCATGATCGGGCAGCTCATCG
ACGACCCGGCGCTCGCGCATCGGGCGCCGGGGCTGGCTGATCGGATAGCC
CAGGGCGGGCAGCTGTCGCTGAGGGCCGAGAACCGACTGCGCAGGGATCT
CACCCGTGCCCTGCTGGCGCTTGCCGTGGACCGGCCTGTGCTGATCGGCG
TCGACGATGTGCATCACGCCGACACCGCCTCTTTGAACTGTCTGCTGCAT
TTGGCCCGCCGGGTCCGTCCGGCCCGGATATCCATGATCTTCACCGAGTT
GCGCAGCCTCACCCCTACTCAGTCACGGTTCAAGGCGGAGCTGCTCAGCC
TGCCATACCACCACGAGATCGCGCTGCGTCCATTCGGACCGGAGCAATCG
GCGGAGCTGGCTCGCGCCGCCTTCGGCCCGGGCCTCGCCGAGGATGTGCT
CGCGGGGTTGTATAAAACGACCAGGGGCAATCTGAGTCTCAGCCGTGGAC
TGATCAGCGATGTGCGGGAGGCCCTGGCCAACGGAGAGAGCGCTTTCGAG
GCGGGCCGCGCGTTCCGGCTGGCGTACCTCAGCTCGCTCTACCGCTGTGG
CCCGGTCGCGCTGCGGGTCGCCCGAGTGGCTGCCGTGCTGGGCCCAAGCG
CCACCACCACGCTGGTGCGCCGGCTAAGCGGGCTCAGCGCGGAGACGATA
GACCGGGCAACCAAGATCCTCACTGAGGGCGGGCTGCTGCTCGACCAGCA
GTTCCCGCACCCGGCCGCCCGCTCGGTGGTGCTCGATGACATGTCCGCCC
AGGAACGACGCAGCCTGCACACTCTCGCCCTGGAACTGCTGGACGAGGCG
CCGGTTGAAGTGCTCGCGCACCACCAGGTCGGCGCCGGTCTCATACACGG
GCCCAAGGCTGCGGAGATGTTCGCCAAGGCCGGCAAGGCTCTGGTCGTAC
GCAACGAGTTGGGCGACGCGGCCGAATACCTGCAACTGGCTCACCGGGCC
TCCGACGATGTCTCCACCCGGGCCGCCCTGCGGGTCGAGGCCGTGGCCAT
CGAGCGCCGCCGCAATCCGCTGGCCTCCAGTCGGCACATGGACGAACTGA
GCGCCGCCGGCCGCGCCGGTCTGCTTTCCCCCAAGCATGCGGCGCTGGCC
GTCTTCTGGCTAGCCGACGGCGGGCGATCCGGCGAGGCAGCCGAAGTGCT
GGCGTCGGAACGCCCGCTCGCGACCACCGATCAGAACCGGGCCCACCTGC
GATTTGTCGAGGTGACTCTCGCGCTGTTCTCTCCCGGCGCCTTCGGATCG
GACCGGCGCCCACCTCCGCTGACGCCGGACGAACTCGCCAGCCTGCCGAA
GGCGGCCTGGCAATGCGCGGTCGCCGACAACGCGGCCATGACCGCCTTGC
ACGGCCATCCAGAACTTGCCACCGCTCAGGCGGAAACAGTTCTGCGGCAG
GCTGATTCGGCAGCCGACGCGATCCCCGCCGCGCTGATCGCCCTGTTGTA
CGCGGAGAACACCGAGTCCGCTCATATCTGGGCCGACAAGCTGGGCAGCA
CGAATGCCGGGGTATCGAACGAGGCGGAAGCGGGCTACGCCGGCCCGTGC
GCCGAGATCGCCCTGCGGCGCGGCGACCTGGCCACGGCGTTCGAGGCTGG
TAGCGCCGTCCTGGACGACCGGTCGCTGCCGTCGCTCGGCATCACCGCCG
CATTGCTGTTGAGCAGCAAGACGGCCGCCGCTGTCCGGCTGGGCGAACTC
GAGCGTGCGGAGAAGCTGCTCGCCGAGCCGCTTCCGAACGGCGTCCAGGA
CAGCCTTTTCGGTCTGCACCTGCTCTCGGCGTACGGCCAGTACAGCCTCG
CGATGGGCCGATATGAATCAGCTCACCGGGCGTTTCGCACCTGCGGAGAA
CGTATGCGCAGCTGGGATGTTGACGTGCCTGGTCTGGCCCTGTGGCGTGT
CGACGCCGCCGAGGCGCTGCTCAGCCTCGACCGGAACGAGGGCCAGCGGC
TCATCGACGAACAACTCACCCGTCCGATGGGGCCTCGTTCCCACGCGCTG
ACGCTGCGGATCAAGGCGGCATACCTCCCGCGGACGAAGCGGATCCCCCT
GCTCCATGAGGCGGCCGAGCTGCTGCTCCCCTGCCCCGACCCGTACGAGC
AAGCGCGGGTGCTCGCCGATCTGGGCGACACGCTCAGCGCGCTCAGACGC
TATAGCCGGGCGCGGGGAGTTCTCCGGCAGGCTCGTCACCTGGCCACCCA
GTGCGGTGCTGTCCCGCTGCTGCGCAGGCTCGGGGGCGAGCCCGGCCGGA
TCGACGACGCCGGCCTGCCGCAGCGGAGCACATCGTTGACCGATGCGGAG
CGGCGGGTGGCGGCGCTGGCCGCGGCCGGACAGACCAACCGGGAGATCGC
CGAACAGCTGTTCGTCACGGCCAGCACAGTGGAACAGCACCTCACAAGCG
TCTTCCGCAAGCTGGGCGTCAAGGGCCGCAAGCAGCTGCCGACCGCGCTG
GCCGACGTGGAACAGACCTGA

SEQ ID NO: 196

GTGTATAGCGGTACCTGCCGTGAAGGATACGAACTCGTCGCCCGCGAGGA
CGAACTCGGCATTCTGCAGAGGTCTCTGGAAGAAGCAGGCAGCGGCCAGG
GCGCCGTGGTCACCGTCACCGGCCCGATCGCCTGCGGCAAGACAGAACTG
CTTGACGCGGCTGCCGCGAAGGCTGACGCCATCATTCTGCGCGCGGTCTG
CGCGCCCGAAGAGCGCGCTATGCCGTACGCCATGATCGGGCAGCTCATCG
ACGACCCGGCGCTCGCGCATCGGGCGCCGGAGCTGGCTGATCGGATAGCC
CAGGGCGGGCATCTGTCGCTGAGGGCCGAGAACCGACTGCGCAGGGATCT
CACCCGTGCCCTGCTGGCGCTTGCCGTCGACCGGCCTGTGCTGATCGGCG
TCGACGATGTGCATCACGCCGACACCGCCTCTTTGAACTGTCTGCTGCAT
TTAGCCCGCCGGGTCCGTCCGGCCCGGATATCCATGATCTTCACCGAGTT
GCGCAGCCTCACCCCTACTCAGTCACGATTCAAGGCGGAGCTGCTCAGCC
TGCCGTACCACCACGAGATCGCGCTGCGTCCACTCGGACCGGAGCAATCG
GCGGAGCTGGCCCACGCCGCCTTCGGCCCGGGCCTCGCCGAGGATGTGCT
CGCGGGGTTGTATGGGATGACCAGGGGCAACCTGAGTCTCAGCCGTGGAC
TGATCAGCGATGTGCGGGAGGCCCAGGCCAACGGAGAGAGCGCTTTCGAG
GTGGGCCGCGCGTTCCGGCTGGCGTACCTCAGCTCGCTCTACCGCTGTGG
CCCGATCGCGCTGCGGGTCGCCCGAGTGGCTGCCGTGCTGGGCCCAAGCG
CCACCACCACGCTGGTGCGCCGTCTAAGCGGGCTCAGCGCGGAGACGATA
GACCGGGCAACCAAGATCCTCACTGAGGGCGGGCTGCTGCTCGACCACCA
GTTCCCGCACCCGGCCGCCCGCTCGGTGGTGCTCGATGACATGTCCGCCC
AGGAACGACGCAGCCTGCACACTCTCGCCCTGGAACTGCTGGACGAGGCG
CCGGTTGAAGTGCTCGCGCACCACCAGGTCGGCGCCGGTCTCATACACGG
GCCCAAGGCTGCGGAGATATTCGCCAGGGCTGGCCAGGCTCTGGTTGTAC
GCAACGAGTTGGGCGACGCGGCCGAATACCTGCAACTGGCTCACCGAGCC
TCCGACGATGTCTCCACCCGGGCCGCCTTACGGGTCGAGGCCGTGGCAAT
CGAGCGCCGCCGCAATCCGCTGGCCTCCAGTCGTCACATGGACGAGCTGA
GCGCCGCCGGCCGCGCCGGTCTGCTTTCCCCCAAGCATGCAGCGCTGGCT
GTCTTCTGGCTGGCCGACGGCGGGCGATCCGGCGAGGCAGCCGAGGTGCT
GGCGTCGGAACACCCGCTCGCGACCACCGATCAGAACCGAGCACACCTGC
GATTTGCCGAGGTGACTCTCGCGCTGTTCTGTCCCGGCGCCTTCGGGTCG
GACCGGCGCCCACCTCCGCTGGCGCCGGACGAGCTCGCCAGCTTGCCGAA
GGCGGCCTGGCAATGCGCGGTCGCCGACAACGCGGTCATGACAGCGTTGC
ATGCTCATCCAGAACTTGCCACCGCTCAGGCGGAAACAGTTCTGCGGCAG
GCTGATTCGGCAGCCGACGCAATCCCCGCCGCACTGATCGCCCTGTTGTA
CGCAGAGAACACCGAGTCCGCTCAGATCTGGGCCGACAAGCTGGGCAGCA
CCAATGCCGGGGTATCGAACGAGGCGGAAGCGGGCTACGCCGGCCCGTGC
GCCGAGATCGCCCTGCGGCGCGGCGACCTGGCCACGGCGTTCGAGGCTGG
TGGCACCGTCCTGGACGACCGGCCGCTGCCGTCGCTCGGCATCACCGCCG
CATTGCTGTTGAGCAGCAAGACGGCAGCCGCTGTCCGCCTGGGCGAACTC
GAGCGTGCGGAGAAGCTGCTCGCTGAGCCGCTTCCGAACGGTGTCCAGGA
CAGCCTTTTCGGTCTGCACCTGCTCTCGGCGCACGGCCAGTACAGCCTCG
CGATGGGCCGATATGAATCGGCTCACCGGGCGTTTCACACCTGCGGAGAA
CGTATGCGCAGCTGGGGTGTTGACGTGCCTGGTCTAGCCCTGTGGCGTGT
CGACGCCGCCGAGGCACTGCTCAGCCTCGACCGGAACGAGGGCCAGCGGC
TCATCGACGAACAACTCGCCCGTCCGATGGGACCTCGTTCCCGCGCATTA
ACGCTGCGGATCAAGGCGGCATACCTCCCGCGGACGAAGCGGATCCCCCT
GCTCCATGAGGCAGCTGAGCTGCTGCTCTCCTGCCCCGACCCGTACGAGC
AAGCGCGGGTGCTCGCCGATCTGGGCGACACGCTCAGCGCGCTCAGACGC
TATAGCCGGGCGCGGGGAGTTCTCCGGCAGGCTCGTCACCTGGCCACCCA
GTGCGGTGCTGTCCCGCTGCTGCGCCGACTCGGGGGCGAGCCCGGCCGGA
TCGACGACGCCGGCCTGCCGCAGCGGAGCACATCGTTGACCGATGCGGAG
CGGCGGGTGTCGGCCCTGGCCGCGGCCGGACAGACCAACCGGGAGATCGC
CAAACAGCTATTCGTCACGGCCAGCACCGTGGAACAGCACCTCACAAGCG
TCTTCCGCAAGCTGGGCGTTAAGGGCCGCAGGCAGCTACCGACCGCGCTG
GCCGACGTGGAATAG

SEQ ID NO: 197

ATGTATAGCGGTACCTGCCGTGAAGGATACGAACTCGTCGCCCGCGAGGA
CGAACTCGGCATTCTGCAGAGGTCTCTGGAAGAAGCAGGCAGCGGCCAGG
GCGCCGTGGTCACCGTCACCGGCCCGATCGCCTGCGGCAAGACAGAACTG
CTTGACGCGGCTGCCGCGAAGGCTGACGCCATCATTCTGCGCGCGGTCTG
CGCGCCCGAAGAGCGCGCTATGCCGTACGCCATGATCGGGCAGCTCATCG
ACGACCCGGCGCTCGCGCATCGGGCGCCGGAGCTGGCTGATCGGATAGCC
CAGGGCGGGCATCTGTCGCTGAGGGCCGAGAACCGACTGCGCAGGGATCT
CACCCGTGCCCTGCTGGCGCTTGCCGTCGACCGGCCTGTGCTGATCGGCG
TCGACGATGTGCATCACGCCGACACCGCCTCTTTGAACTGTCTGCTGCAT
CTGGCCCGCCGGGTCCGTCCGGCCCGGATATCCATGATCTTCACCGAGTT
GCGCAGCCTCACCCCTACTCAGTCACGATTCAAGGCGGAGCTGCTCAGCC
TGCCGTACCACCACGAGATCGCGCTGCGTCCACTCGGACCGGAGCAATCG
GCGGAGCTGGCCCACGCCGCCTTCGGCCCGGGCCTCGCCGAGGATGTGCT
CGCGGGGTTGTATGGGATGACCAGGGGCAACCTGAGTCTCAGCCGTGGAC
TGATCAGCGATGTGCGGGAGGCCCAGGCCAACGGAGAGAGCGCTTTCGAG
GTGGGCCGCGCGTTCCGGCTGGCGTACCTCAGCTCGCTCTACCGCTGTGG
CCCGATCGCGCTGCGGGTCGCCCGAGTGGCTGCCGTGCTGGGCCCAAGCG
CCACCACCACGCTGGTGCGCCGTCTAAGCGGGCTCAGCGCGGAGACGATA
GACCGGGCAACCAAGATCCTCACTGAGGGCGGGCTGCTGCTCGACCACCA
GTTCCCGCACCCGGCCGCCCGCTCGGTGGTGCTCGATGACATGTCCGCCC
AGGAACGACGCAGCCTGCACACTCTCGCCCTGGAACTGCTGGACGAGGCG
CCGGTTGAAGTGCTCGCGCACCACCAGGTCGGCGCCGGTCTCATACACGG
GCCCAAGGCTGCGGAGATATTCGCCAGGGCTGGCCAGGCTCTGGTTGTAC
GCAACGAGTTGGGCGACGCGGCCGAATACCTGCAACTGGCTCACCGAGCC
TCCGACGATGTCTCCACCCGGGCCGCCCTGCGGGTCGAGGCCGTGGCAAT
CGAGCGCCGCCGCAATCCGCTGGCCTCCAGTCGTCACATGGACGAGCTGA
GCGCCGCCGGCCGCGCCGGTCTGCTTTCCCCCAAGCATGCAGCGCTGGCT
GTCTTCTGGCTGGCCGACGGCGGGCGATCCGGCGAGGCAGCCGAGGTGCT
GGCGTCGGAACACCCGCTCGCGACCACCGATCAGAACCGAGCACACCTGC
GATTTGCCGAGGTGACTCTCGCGCTGTTCTGTCCCGGCGCCTTCGGGTCG
GACCGGCGCCCACCTCCGCTGGCGCCGGACGAGCTCGCCAGCTTGCCGAA
GGCGGCCTGGCAATGCGCGGTCGCCGACAACGCGGTCATGACAGCGTTGC
ATGCTCATCCAGAACTTGCCACCGCTCAGGCGGAAACAGTTCTGCGGCAG
GCTGATTCGGCAGCCGACGCAATCCCCGCCGCACTGATCGCCCTGTTGTA
CGCAGAGAACACCGAGTCCGCTCAGATCTGGGCCGACAAGCTGGGCAGCA
CCAATGCCGGGGTATCGAACGAGGCGGAAGCGGGCTACGCCGGCCCGTGC
GCCGAGATCGCCCTGCGGCGCGGCGACCTGGCCACGGCGTTCGAGGCTGG
TGGCACCGTCCTGGACGACCGGCCGCTGCCGTCGCTCGGCATCACCGCCG
CATTGCTGTTGAGCAGCAAGACGGCAGCCGCTGTCCGCCTGGGCGAACTC
GAGCGTGCGGAGAAGCTGCTCGCTGAGCCGCTTCCGAACGGTGTCCAGGA
CAGCCTTTTCGGTCTGCACCTGCTCTCGGCGCACGGCCAGTACAGCCTCG
CGATGGGCCGATATGAATCGGCTCACCGGGCGTTTCACACCTGCGGAGAA
CGTATGCGCAGCTGGGGTGTTGACGTGCCTGGTCTAGCCCTGTGGCGTGT
CGACGCCGCCGAGGCACTGCTCAGCCTCGACCGGAACGAGGGCCAGCGGC
TCATCGACGAACAACTCGCCCGTCCGATGGGACCTCGTTCCCGCGCACTG
ACGCTGCGGATCAAGGCGGCATACCTCCCGCGGACGAAGCGGATCCCCCT
GCTCCATGAGGCAGCTGAGCTGCTGCTCTCCTGCCCCGACCCGTACGAGC
AAGCGCGGGTGCTCGCCGATCTGGGCGACACGCTCAGCGCGCTCAGACGC
TATAGCCGGGCGCGGGGAGTTCTCCGGCAGGCTCGTCACCTGGCCACCCA
GTGCGGTGCTGTCCCGCTGCTGCGCCGACTCGGGGGCGAGCCCGGCCGGA
TCGACGACGCCGGCCTGCCGCAGCGGAGCACATCGTTGACCGATGCGGAG
CGGCGGGTGTCGGCCCTGGCCGCGGCCGGACAGACCAACCGGGAGATCGC
CAAACAGCTATTCGTCACGGCCAGCACCGTGGAACAGCACCTCACAAGCG
TCTTCCGCAAGCTGGGCGTTAAGGGCCGCAGGCAGCTACCGACCGCGCTG
GCCGACGTGGAATAG

SEQ ID NO: 198

GTGTATAGCGGTACCTGCCGTGAAGGATACGAACTCGTCGCACGCGAGGA
CGAACTCGGCATTCTACAGAGGTCTCTGGAACAAGCGAGCAGCGGCCAGG
GCGTCGTGGTCACCGTCACCGGCCCAATCGCCTGCGGCAAGACAGAACTG
CTTGACGCGGCTGCCGCGAAGGCTGAGGCCATCATTCTGCGCGCGGTCTG
CGCGCCCGAAGAGCGGGCTATGCCGTACGCCATGATCGGGCAGCTCATCG
ACGACCCGGCGCTCGCGCATCGGGCGCCGGGGCTGGCTGATCGGATAGCC
CAGGGCGGGCAGCTGTCGCTGAGGGCCGAGAACCGACTGCGCAGGGATCT
CACCCGTGCCCTGCTGGCGCTTGCCGTGCACCGGCCTGTGCTGATCGGCG
TCGATGATGTGCATCACGCCGACACCGCCTCTTTGAACTGTCTGCTGCAT
TTGGCGCGCCGGGTCCGTCCGGCCCGGATATCCATGATCTTCACCGAGTT
GCGCAGCCTCACCCCTACTCAGTCACGATTCAAGGCGGAGCTGCTCAGCC
TGCCGTACCACCACGAGATCGCGCTGCGTCCATTCGGACCGGAGCAATCG
GCGGAGCTGGCTCGCGCCGCCTTCGGCCCGGGCCTCGCCGAGGATGTGCT
CGCGGGGTTGTATAAAACGACCAGGGGCAATCTGAGTCTCAGCCGTGGAC
TGATCAGCGATGTGCGGGAGGCCCTGGCCAACGGAGAGAGCGCTTTCGAG
GCGGGCCGCGCGTTCCGGCTGGCGTACCTCAGCTCGCTCTACCGCTGTGG
CCCGGTCGCGCTGCGGGTCGCCCGAGTGGCTGCCGTGCTGGGCCCAAGCG
CCACCACCACGCTGGTGCGCCGGCTAAGCGGGCTCAGCGCGGAGACGATA
GACCGGGCAACCAAGATCCTCACCGAGGGCGGGCTGCTGCTCGACCAGCA
GTTTCCGCACCCGGCCGCCCGCTCGGTGGTGCTCGATGACATGTCCGCCC
AGGAACGACGCGGCCTGCACACTCTCGCCCTGGAACTGCTGGACGAGGCG
CCGGTTGAAGTGCTCGCGCACCACCAGGTCGGCGCCGGTCTCATACACGG
GCCCAAGGCTGCGGAGATGTTCGCCAAGGCCGGCAAGGCTCTGGTCGTAC
GCAACGAGTTGGGCGACGCGGCCGAATACCTGCAACTGGCTCACCGGGCC
TCCGACGATGTCTCCACCCGGGCCGCCTTACGGGTCGAGGCCGTGGCGAT
CGAGCGCCGCCGCAATCCGCTGGCCTCCAGTCGGCACATGGACGAGCTGA
GCGCCGCCGGCCGCGCCGGTCTGCTTTCCCCCAAGCATGCGGCGCTGGCC
GTCTTCTGGCTGGCCGACGGCGGGCGATCCGGCGAGGCAGCCCAGGTGCT
GGCGTCGGAACGCCCGCTCGCGACCACCGATCAGAACCGGGCCCACCTGC
GATTTGTCGAGGTGACTCTCGCGCTGTTCTCTCCCGGCGCCTTCGGATCG
GACCGGCGCCCACCTCCGCTGACGCCGGACGAACTCGCCAGCCTGCCGAA
GGCGGCCTGGCAATGCGCGGTCGCCGACAACGCGGCCATGACCGCCTTGC
ACGGCCATCCAGAACTTGCCACCGCTCAGGCGGAAACAGTTCTGCGGCAG
GCTGATTCGGCAGCCGACGCGATCCCCGCCGCGCTGATCGCCCTGTTGTA
CGCGGAGAACACCGAGTCCGCTCATATCTGGGCCGACAAGCTGGGCAGCA
TGAATGCCGGGGTATCGAACGAGGCGGAAGCGGGCTACGCCGGCCCGTGC
GCCGAGATCGCCCTGCGGCGCGGCGACCTGGCCACGGCGTTCGAGGCTGG
TAGCACCGTCCTGGACGACCGGTCACTGCCGTCGCTCGGCATCACCGCCG
CATTGCTGTTGAGCAGCAAGACGGCCGCCGCTGTCCGGCTGGGCGAACTC
GAGCGTGCGGAGAAGCTGCTCGCCGAGCCGCTTCCGAACGGCGTCCAGGA
CAGCCTTTTCGGTCTGCACCTGCTCTCGGCGTACGGCCAGTACAGCCTCG
CGATGGGCCGATATGAATCGGCTCACCGGGCGTTTCGCACCTGCGGAGAA
CGTATGCGCAGCTGGGATGTTGACGTGCCTGGTCTGGCCCTGTGGCGTGT
CGACGCCGCCGAGGCGCTGCTCAGCCTCGACCGGAACGAGGGCCAGCGGC
TCATCGACGAACAACTCACCCGTCCGATGGGACCTCGTTCCCGCGCGTTA
ACGCTGCGGATCAAGGCGGCATACCTCCCGCGGACGAAGCGGATCCCCCT
GCTCCATGAGGCGGCCGAGCTGCTGCTCCCCTGCCCCGACCCGTACGAGC
AAGCGCGGGTGCTCGCCGATCTGGGCGACACGCTCAGCGCGCTCAGACGC
TATAGCCGGGCGCGGGGAGTTCTCCGGCAGGCTCGTCACCTGGCCACCCA
GTGCGGTGCTGTCCCGCTGCTGCGCCGACTCGGGGGCGAGCCCGGCCGGA
TCGACGACGCCGGCCTGCCGCAGCGGAGCACATCGTTGACCGATGCGGAG
CGGCGGGTGGCGGCGCTGGCCGCGGCCGGACAGACCAACCGGGAGATCGC
CGAACAGCTGTTCGTCACGGCCAGCACAGTGGAACAGCACCTCACAAGCG
TCTTCCGCAAGCTGGGCGTCAAGGGCCGCAAGCAGCTGCCGACCGCGCTG
GCCGACGTGGAACAGACCTGA

SEQ ID NO: 199

ATGTATAGCGGTACCTGCCGTGAAGGATACGAACTCGTCGCACGCGAGGA
CGAACTCGGCATTCTACAGAGGTCTCTGGAACAAGCGAGCAGCGGCCAGG
GCGTCGTGGTCACCGTCACCGGCCCAATCGCCTGCGGCAAGACAGAACTG
CTTGACGCGGCTGCCGCGAAGGCTGAGGCCATCATTCTGCGCGCGGTCTG
CGCGCCCGAAGAGCGGGCTATGCCGTACGCCATGATCGGGCAGCTCATCG
ACGACCCGGCGCTCGCGCATCGGGCGCCGGGGCTGGCTGATCGGATAGCC
CAGGGCGGGCAGCTGTCGCTGAGGGCCGAGAACCGACTGCGCAGGGATCT
CACCCGTGCCCTGCTGGCGCTTGCCGTGCACCGGCCTGTGCTGATCGGCG
TCGATGATGTGCATCACGCCGACACCGCCTCTTTGAACTGTCTGCTGCAT
TTGGCGCGCCGGGTCCGTCCGGCCCGGATATCCATGATCTTCACCGAGTT
GCGCAGCCTCACCCCTACTCAGTCACGATTCAAGGCGGAGCTGCTCAGCC
TGCCGTACCACCACGAGATCGCGCTGCGTCCATTCGGACCGGAGCAATCG
GCGGAGCTGGCTCGCGCCGCCTTCGGCCCGGGCCTCGCCGAGGATGTGCT
CGCGGGGTTGTATAAAACGACCAGGGGCAATCTGAGTCTCAGCCGTGGAC
TGATCAGCGATGTGCGGGAGGCCCTGGCCAACGGAGAGAGCGCTTTCGAG
GCGGGCCGCGCGTTCCGGCTGGCGTACCTCAGCTCGCTCTACCGCTGTGG
CCCGGTCGCGCTGCGGGTCGCCCGAGTGGCTGCCGTGCTGGGCCCAAGCG
CCACCACCACGCTGGTGCGCCGGCTAAGCGGGCTCAGCGCGGAGACGATA
GACCGGGCAACCAAGATCCTCACCGAGGGCGGGCTGCTGCTCGACCAGCA
GTTTCCGCACCCGGCCGCCCGCTCGGTGGTGCTCGATGACATGTCCGCCC
AGGAACGACGCGGCCTGCACACTCTCGCCCTGGAACTGCTGGACGAGGCG
CCGGTTGAAGTGCTCGCGCACCACCAGGTCGGCGCCGGTCTCATACACGG
GCCCAAGGCTGCGGAGATGTTCGCCAAGGCCGGCAAGGCTCTGGTCGTAC
GCAACGAGTTGGGCGACGCGGCCGAATACCTGCAACTGGCTCACCGGGCC
TCCGACGATGTCTCCACCCGGGCCGCCCTGCGGGTCGAGGCCGTGGCGAT
CGAGCGCCGCCGCAATCCGCTGGCCTCCAGTCGGCACATGGACGAGCTGA
GCGCCGCCGGCCGCGCCGGTCTGCTTTCCCCCAAGCATGCGGCGCTGGCC
GTCTTCTGGCTGGCCGACGGCGGGCGATCCGGCGAGGCAGCCCAGGTGCT
GGCGTCGGAACGCCCGCTCGCGACCACCGATCAGAACCGGGCCCACCTGC
GATTTGTCGAGGTGACTCTCGCGCTGTTCTCTCCCGGCGCCTTCGGATCG
GACCGGCGCCCACCTCCGCTGACGCCGGACGAACTCGCCAGCCTGCCGAA
GGCGGCCTGGCAATGCGCGGTCGCCGACAACGCGGCCATGACCGCCTTGC
ACGGCCATCCAGAACTTGCCACCGCTCAGGCGGAAACAGTTCTGCGGCAG
GCTGATTCGGCAGCCGACGCGATCCCCGCCGCGCTGATCGCCCTGTTGTA
CGCGGAGAACACCGAGTCCGCTCATATCTGGGCCGACAAGCTGGGCAGCA
TGAATGCCGGGGTATCGAACGAGGCGGAAGCGGGCTACGCCGGCCCGTGC
GCCGAGATCGCCCTGCGGCGCGGCGACCTGGCCACGGCGTTCGAGGCTGG
TAGCACCGTCCTGGACGACCGGTCACTGCCGTCGCTCGGCATCACCGCCG
CATTGCTGTTGAGCAGCAAGACGGCCGCCGCTGTCCGGCTGGGCGAACTC
GAGCGTGCGGAGAAGCTGCTCGCCGAGCCGCTTCCGAACGGCGTCCAGGA
CAGCCTTTTCGGTCTGCACCTGCTCTCGGCGTACGGCCAGTACAGCCTCG
CGATGGGCCGATATGAATCGGCTCACCGGGCGTTTCGCACCTGCGGAGAA
CGTATGCGCAGCTGGGATGTTGACGTGCCTGGTCTGGCCCTGTGGCGTGT
CGACGCCGCCGAGGCGCTGCTCAGCCTCGACCGGAACGAGGGCCAGCGGC
TCATCGACGAACAACTCACCCGTCCGATGGGACCTCGTTCCCGCGCGCTG
ACGCTGCGGATCAAGGCGGCATACCTCCCGCGGACGAAGCGGATCCCCCT
GCTCCATGAGGCGGCCGAGCTGCTGCTCCCCTGCCCCGACCCGTACGAGC
AAGCGCGGGTGCTCGCCGATCTGGGCGACACGCTCAGCGCGCTCAGACGC
TATAGCCGGGCGCGGGGAGTTCTCCGGCAGGCTCGTCACCTGGCCACCCA
GTGCGGTGCTGTCCCGCTGCTGCGCCGACTCGGGGGCGAGCCCGGCCGGA
TCGACGACGCCGGCCTGCCGCAGCGGAGCACATCGTTGACCGATGCGGAG
CGGCGGGTGGCGGCGCTGGCCGCGGCCGGACAGACCAACCGGGAGATCGC
CGAACAGCTGTTCGTCACGGCCAGCACAGTGGAACAGCACCTCACAAGCG
TCTTCCGCAAGCTGGGCGTCAAGGGCCGCAAGCAGCTGCCGACCGCGCTG
GCCGACGTGGAACAGACCTGA

SEQ ID NO: 200

GTGCGAGCTATTAATGCGTCCGACACCGGTCCTGAACTGGTCGCCCGCGA
AGACGAACTGGGACGTGTACGAAGTGCCCTGAACCGAGCGAACGGCGGCC
AAGGTGTCCTGATCTCCATTACCGGTCCGATCGCCTGCGGCAAGACCGAA
CTGCTTGAGGCTGCCGCCTCGGAAGTTGACGCCATCACTCTGCGCGCGGT
CTGTGCCGCCGAGGAACGGGCGATACCTTATGCCCTGATCGGGCAGCTTA
TCGACAACCCCGCGCTCGGCATTCCGGTTCCGGATCCGGCCGGCCTGACC
GCCCAGGGCGGACGACTGTCATCGAGCGCCGAGAACCGACTGCGTCGCGA
CCTCACCCGTGCCCTGCTGACGCTCGCCACCGACCGGCTGGTGCTGATCT
GTGTCGATGACGTGCAGCACGCCGACAACGCCTCGTTGAGCTGCCTTCTG
TATCTGGCCCGACGGCTTGTCCCGGCTCGAATCGCTCTGGTATTCACCGA
GTTGCGAGTCCTCACCTCGTCTCAGTTACGGTTCAACGCGGAGCTGCTCA
GCTTGCGGAACCACTGCGAGATCGCGCTGCGCCCACTCGGCCCGGGGCAT
GCGGCCGAGCTGGCCCGCGCCACCCTCGGCCCCGGCCTCTCCGACGAAAC
ACTCACGGAGCTGTACCGGGTGACCGGAGGCAACCTGAGTCTCAGCCGCG
GGCTGATCGACGATGTGCGGGACGCCTGGGCACGAGGGGAAACGGGCGTC
CAGGTGGGCCGGGCGTTCCGGCTGGCCTACCTCGGTTCCCTCCACCGCTG
TGGTCCGCTGGCGTTGCGGGTCGCCCGCGTAGCCGCCGTACTGGGCCCGA
GCGCCACCAGCGTCCTGGTGCGCCGGATCAGTGGGCTCAGCGCGGAGGCC
ATGGCCCAGGCGACCGATATCCTCGCTGACGGCGGCCTCCTGCGCGACCA
GCGGTTCACACATCCAGCGGCCCGCTCGGTGGTGCTCGACGACATGTCCG
CCGAGGAACGACGCAGCGTGCACAGCCTCGCCCTGGAACTGCTGGACGAG
GCACCGGCCGAGATGCTCGCGCACCACCGGGTCGGCGCCGGTCTCGTGCA
CGGGCCGAAGGCCGCGGAGACATTCACCGGGGCCGGCCGGGCACTGGCCG
TTCGCGGCATGCTGGGCGAGGCAGCCGACTACCTGCAACTGGCGTACCGG
GCCTCCGGCGACGCCGCTACCAAGGCCGCGATACGCGTCGAGTCCGTGGC
GGTCGAGCGCCGACGCAATCCGCTGGTCGTCAGTCGCCATTGGGACGAGC
TGAGCGTCGCGGCCCGCGCCGGTCTGCTCTCCTGCGAGCACGTGTCCAGG
ACGGCCCGCTGGCTGACCGTCGGTGGGCGGCCCGGCGAGGCGGCCAGGGT
GCTGGCGTCGCAACACCGACGGGTCGTCACCGATCAGGACCGGGCCCACC
TGCGGGTCGCCGAGTTCTCGCTCGCGCTGCTGTACCCCGGTACGTCCGGC
TCGGACCGGCGCCCGCACCCGCTCACGTCGGACGAACTCGCGGCCCTACC
GACTGCGACCAGACACTGCGCGATCGCCGATAACGCTGTCATGGCTGCCT
TGCGTGGTCATCCGGAGCTTGCCACCGCCGAGGCAGAAGCCGTTCTGCAG
CAAGCCGACGCGGCGGACGGCGCTGCTCTCACCGCGCTGATGGCCCTGCT
GTACGCGGAGAGCATCGAGGTCGCTGAAGTCTGGGCGGACAAGCTGGCGG
CAGAGGCCGGAGCATCGAACGGGCAGGACGCGGAGTACGCCGGTATACGC
GCCGAAATCGCCCTGCGGCGCGGCGATCTGACCGCGGCCGTCGAGACCGC
CGGCATGGTCCTGGACGGCCGGCCGCTGCCGTCGCTCGACATCACCGCCA
CGTTGCTGTTGGCCGGCAGGGCGTCCGTCGCCGTCCGGCTGGGCGAACTC
GACCACGCGGAGGAGCTGTTCGCCGCGCCGCCGGAGGACGCCTTCCAGGA
CAGCCTCTTCGGTCTGCATCTGCTCTCGGCGCACGGCCAGTACAGCCTCG
CGACAGGCCGGCCCGAGTCGGCATACCGGGCCTTTCGTGCCTGCGGCGAA
CGTATGCGCGATTGGGGCTTCGACGCGCCCGGTGTGGCCCTGTGGCGCGT
CGGCGCCGCCGAGGCGCTGCTCGGCCTCGACCGGAACGAGGGCCGACGGC
TCATCGACGAACAGCTGAGCCGGACGATGGCCCCCCGGTCCCACGCGTTG
ACGCTGCGGATAAAAGCGGCGTACATGCCGGAGCCGAAGCGGGTCGACCT
GCTCTACGAAGCGGCTGAGCTGCTGCTCTCCTGCCGGGACCAGTATGAGC
GAGCGCGGGTGCTCGCCGATCTGGGCGAGGCGCTCAGCGCGCTCGGGAAC
TACCGGCAGGCGCGAGGTGTGCTCCGGCAGGCTCGGCATCTGGCCATGCG
AACCGGCGCGGACCCGCTGCTGCGCCGGCTCGGAATCAGGCCCGGCCGGC
AGGACGACCCCGACCCGCAGCCGCGGAGCAGATCGCTGACCAACGCTGAG
CGGCGTGCGGCGTCGCTGGCCGCGACCGGACTGACCAACCGGGAGATCGC
CGACCGGCTCTTCGTCACCGCCAGCACCGTGGAGCAGCACCTCACCAACG
TCTTCCGCAAGCTGGGCGTCAAGGGCCGCAAGCAGCTGCCGGCCGAGTTG
GACGACATGGAATAG

SEQ ID NO: 201

ATGCGAGCTATTAATGCGTCCGACACCGGTCCTGAACTGGTCGCCCGCGA
AGACGAACTGGGACGTGTACGAAGTGCCCTGAACCGAGCGAACGGCGGCC
AAGGTGTCCTGATCTCCATTACCGGTCCGATCGCCTGCGGCAAGACCGAA
CTGCTTGAGGCTGCCGCCTCGGAAGTTGACGCCATCACTCTGCGCGCGGT
CTGTGCCGCCGAGGAACGGGCGATACCTTATGCCCTGATCGGGCAGCTTA
TCGACAACCCCGCGCTCGGCATTCCGGTTCCGGATCCGGCCGGCCTGACC
GCCCAGGGCGGACGACTGTCATCGAGCGCCGAGAACCGACTGCGTCGCGA
CCTCACCCGTGCCCTGCTGACGCTCGCCACCGACCGGCTGGTGCTGATCT
GTGTCGATGACGTGCAGCACGCCGACAACGCCTCGTTGAGCTGCCTTCTG
TATCTGGCCCGACGGCTTGTCCCGGCTCGAATCGCTCTGGTATTCACCGA
GTTGCGAGTCCTCACCTCGTCTCAGCTGCGGTTCAACGCGGAGCTGCTCA
GCTTGCGGAACCACTGCGAGATCGCGCTGCGCCCACTCGGCCCGGGGCAT
GCGGCCGAGCTGGCCCGCGCCACCCTCGGCCCCGGCCTCTCCGACGAAAC
ACTCACGGAGCTGTACCGGGTGACCGGAGGCAACCTGAGTCTCAGCCGCG
GGCTGATCGACGATGTGCGGGACGCCTGGGCACGAGGGGAAACGGGCGTC
CAGGTGGGCCGGGCGTTCCGGCTGGCCTACCTCGGTTCCCTCCACCGCTG
TGGTCCGCTGGCGTTGCGGGTCGCCCGCGTAGCCGCCGTACTGGGCCCGA
GCGCCACCAGCGTCCTGGTGCGCCGGATCAGTGGGCTCAGCGCGGAGGCC
ATGGCCCAGGCGACCGATATCCTCGCTGACGGCGGCCTCCTGCGCGACCA
GCGGTTCACACATCCAGCGGCCCGCTCGGTGGTGCTCGACGACATGTCCG
CCGAGGAACGACGCAGCGTGCACAGCCTCGCCCTGGAACTGCTGGACGAG
GCACCGGCCGAGATGCTCGCGCACCACCGGGTCGGCGCCGGTCTCGTGCA
CGGGCCGAAGGCCGCGGAGACATTCACCGGGGCCGGCCGGGCACTGGCCG
TTCGCGGCATGCTGGGCGAGGCAGCCGACTACCTGCAACTGGCGTACCGG
GCCTCCGGCGACGCCGCTACCAAGGCCGCGATACGCGTCGAGTCCGTGGC
GGTCGAGCGCCGACGCAATCCGCTGGTCGTCAGTCGCCATTGGGACGAGC
TGAGCGTCGCGGCCCGCGCCGGTCTGCTCTCCTGCGAGCACGTGTCCAGG
ACGGCCCGCTGGCTGACCGTCGGTGGGCGGCCCGGCGAGGCGGCCAGGGT
GCTGGCGTCGCAACACCGACGGGTCGTCACCGATCAGGACCGGGCCCACC
TGCGGGTCGCCGAGTTCTCGCTCGCGCTGCTGTACCCCGGTACGTCCGGC
TCGGACCGGCGCCCGCACCCGCTCACGTCGGACGAACTCGCGGCCCTACC
GACTGCGACCAGACACTGCGCGATCGCCGATAACGCTGTCATGGCTGCCT
TGCGTGGTCATCCGGAGCTTGCCACCGCCGAGGCAGAAGCCGTTCTGCAG
CAAGCCGACGCGGCGGACGGCGCTGCTCTCACCGCGCTGATGGCCCTGCT
GTACGCGGAGAGCATCGAGGTCGCTGAAGTCTGGGCGGACAAGCTGGCGG
CAGAGGCCGGAGCATCGAACGGGCAGGACGCGGAGTACGCCGGTATACGC
GCCGAAATCGCCCTGCGGCGCGGCGATCTGACCGCGGCCGTCGAGACCGC
CGGCATGGTCCTGGACGGCCGGCCGCTGCCGTCGCTCGACATCACCGCCA
CGTTGCTGTTGGCCGGCAGGGCGTCCGTCGCCGTCCGGCTGGGCGAACTC
GACCACGCGGAGGAGCTGTTCGCCGCGCCGCCGGAGGACGCCTTCCAGGA
CAGCCTCTTCGGTCTGCATCTGCTCTCGGCGCACGGCCAGTACAGCCTCG
CGACAGGCCGGCCCGAGTCGGCATACCGGGCCTTTCGTGCCTGCGGCGAA
CGTATGCGCGATTGGGGCTTCGACGCGCCCGGTGTGGCCCTGTGGCGCGT
CGGCGCCGCCGAGGCGCTGCTCGGCCTCGACCGGAACGAGGGCCGACGGC
TCATCGACGAACAGCTGAGCCGGACGATGGCCCCCCGGTCCCACGCGTTG
ACGCTGCGGATAAAAGCGGCGTACATGCCGGAGCCGAAGCGGGTCGACCT
GCTCTACGAAGCGGCTGAGCTGCTGCTCTCCTGCCGGGACCAGTATGAGC
GAGCGCGGGTGCTCGCCGATCTGGGCGAGGCGCTCAGCGCGCTCGGGAAC
TACCGGCAGGCGCGAGGTGTGCTCCGGCAGGCTCGGCATCTGGCCATGCG
AACCGGCGCGGACCCGCTGCTGCGCCGGCTCGGAATCAGGCCCGGCCGGC
AGGACGACCCCGACCCGCAGCCGCGGAGCAGATCGCTGACCAACGCTGAG
CGGCGTGCGGCGTCGCTGGCCGCGACCGGACTGACCAACCGGGAGATCGC
CGACCGGCTCTTCGTCACCGCCAGCACCGTGGAGCAGCACCTCACCAACG
TCTTCCGCAAGCTGGGCGTCAAGGGCCGCAAGCAGCTGCCGGCCGAGTTG
GACGACATGGAATAG

SEQ ID NO: 202

MPAVECYELDARDDELRKLEEVVTGRANGRGVVVTITGPIACGKTELLDA
AAAKADAITLRAVCSAEEQALPYALIGQLIDNPALASHALEPACPTLPGE
HLSPEAENRLRSDLTRTLLALAAERPVLIGIDESHANALCLLHLARRVGS
ARIAMVLTELRRLTPAHSQFQAELLSLGHHREIALRPLSPKHTAELVRAG
LGPDVDEDVLTGLYRATGGNLNLTRGLINDVREAWETGGTGISAGRAYRL
AYLGSLYRCGPVPLRVARVAAVLGQSANTTLVRWISGLNADAVGEATEIL
TEGGLLHDLRFPHPAARSVVLNDMSAQERRRLHRSALEVLDDVPVEVVAH
HQVGAGLLHGPKAAEIFAKAGQELHVRGELDTASDYLQLAHQASDDAVTG
MRAEAVAIERRRNPLASSRHLDELTVVARAGLLFPEHTALMIRWLGVGGR
SGEAAGLLASQRPRAVTDQDRAHMRAAEVSLALVSPGTSGPDRRPRPLTP
DELANLPKAARLCAIADNAVMSALRGRPELAAAEAENVLQHADSAAAGTT
ALAALTALLYAENTDTAQLWADKLVSETGASNEEEAGYAGPRAEAALRRG
DLAAAVEAGSTVLDHRRLSTLGITAALPLSSAVAAAIRLGETERAEKWLA
QPLPQAIQDGLFGLHLLSARGQYSLATGQHESAYTAFRTCGERMRNWGVD
VPGLSLWRVDAAEALLHGRDRDEGRRLVDEQLTRAMGPRSRALTLRVQAA
YSPPAKRVDLLDEAADLLLSCNDQYERARVLADLSETFSALRHHSRARGL
LRQARHLAAQRGAIPLLRRLGAKPGGPGWLEESGLPQRIKSLTDAERRVA
SLAAGGQTNRVIADQLFVTASTVEQHLTDVSTGSRPPAPAAELV

SEQ ID NO: 203

MVPEVRAAPDELIARDDELSRLQRALTRAGSGRGGVVAITGPIASGKTAL
LDAGAAKSGFVALRAVCSWEERTLPYGMLGQLFDHPELAAQAPDLAHFTA
SCESPQAGTDNRLRAEFTRTLLALAADWPVLIGIDDVHHADAESLRCLLH
LARRIGPARIAVVLTELRRPTPADSRFQAELLSLRSYQEIALRPLTEAQT
GELVRRHLGAETHEDVSADTFRATGGNLLLGHGLINDIREARTAGRPGVV
AGRAYRLAYLSSLYRCGPSALRVARASAVLGASAEAVLVQRMTGLNKDAV
EQVYEQLNEGRLLQGERFPHPAARSIVLDDLSALERRNLHESALELLRDH
GVAGNVLARHQIGAGRVHGEEAVELFTGAAREHHLRGELDDAAGYLELAH
RASDDPVTRAALRVGAAAIERLCNPVRAGRHLPELLTASRAGLLSSEHAV
SLADWLAMGGRPGEAAEVLATQRPAADSEQHRALLRSGELSLALVHPGAW
DPLRRTDRFAAGGLGSLPGPARHRAVADQAVIAALRGRLDRADANAESVL
QHTDATADRTTAIMALLALLYAENTDAVQFWVDKLAGDEGTRTPADEAVH
AGFNAEIALRRGDLMRAVEYGEAALGHRHLPTWGMAAALPLSSTVVAAIR
LGDLDRAERWLAEPLPQQTPESLFGLHLLWARGQHHLATGRHGAAYTAFR
ECGERMRRWAVDVPGLALWRVDAAESLLLLGRDRAEGLRLVSEQLSRPMR
PRARVQTLRVQAAYSPPPQRIDLLEEAADLLVTCNDQYELANVLSDLAEA
SSMVRQHSRARGLLRRARHLATQCGAVPLLRRLGAEPSDIGGAWDATLGQ
RIASLTESERRVAALAAVGRTNREIAEQLFVTASTVEQHLTNVFRKLAVK
GRQQLPKELADVGEPADRDRRCG

SEQ ID NO: 204

MIARLSPPDLIARDDEFGSLHRALTRAGGGRGVVAAVTGPIACGKTELLD
AAAAKAGFVTLRAVCSMEERALPYGMLGQLLDQPELAARTPELVRLTASC
ENLPADVDNRLGTELTRTVLTLAAERPVLIGIDDVHHADAPSLRCLLHLA
RRISRARVAIVLTELLRPTPAHSQFRAALLSLRHYQEIALRPLTEAQTTE
LVRRHLGQDAHDDVVAQAFRATGGNLLLGHGLIDDIREARTRTSGCLEVV
AGRAYRLAYLGSLYRCGPAALSVARASAVLGESVELTLVQRMTGLDTEAV
EQAHEQLVEGRLLREGRFPHPAARSVVLDDLSAAERRGLHELALELLRDR
GVASKVLARHQMGTGRVHGAEVAGLFTDAAREHHLRGELDEAVTYLEFAY
RASDDPAVHAALRVDTAAIERLCDPARSGRHVPELLTASRERLLSSEHAV
SLACWLAMDGRPGEAAEVLAAQRSAAPSEQGRAHLRVADLSLALIYPGAA
DPPRPADPPAEDEVASFSGAVRHRAVADKALSNALRGWSEQAEAKAEYVL
QHSRVTTDRTTTMMALLALLYAEDTDAVQSWVDKLAGDDNMRTPADEAVH
AGFRAEAALRRGDLTAAVECGEAALAPRVVPSWGMAAALPLSSTVAAAIR
LGDLDRAERWLAEPLPEETSDSLFGLHMVWARGQHHLAAGRYRAAYNAFR
DCGERMRRWSVDVPGLALWRVDAAEALLLLGRGRDEGLRLISEQLSRPMG
SRARVMTLRVQAAYSPPAKRIELLDEAADLLIMCRDQYELARVLADMGEA
CGMLRRHSRARGLFRRARHLATQCGAVPLLRRLGGESSDADGTQDVTPAQ
RITSLTEAERRVASHAAVGRTNKEIASQLFVTSSTVEQHLTNVFRKLGVK
GRQQLPKELSDAG

SEQ ID NO: 205

MEFYDLVARDDELRRLDQALGRAAGGRGVVVTVTGPVGCGKTELLDAAAA
EEEFITLRAVCSAEERALPYAVIGQLLDHPVLSARAPDLACVTAPGRTLP
ADTENRLRRDLTRALLALASERPVLICIDDVHQADTASLNCLLHLARRVA
SARIAMILTELRRLTPAHSRFEAELLSLRHRHEIALRPLGPADTAELARA
RLGAGVTADELAQVHEATSGNPNLVGGLVNDVREAWAAGGTGIAAGRAYR
LAYLSSVYRCGPVPLRIAQAAAVLGPSATVTLVRRISGLDAETVDEATAI
LTEGGLLRDHRFPHPAARSVVLDDMSAQERRRLHRSTLDVLDGVPVDVLA
HHQAGAGLLHGPQAAEMFARASQELRVRGELDAATEYLQLAYRASDDAGA
RAALQVETVAGERRRNPLAASRHLDELAAAARAGLLSAEHAALVVHWLAD
AGRPGEAAEVLALQRALAVTDHDRARLRAAEVSLALFHPGVPGSDPRPLA
PEELASLSLSARHGVTADNAVLAALRGRPESAAAEAENVLRNADAAASGP
TALAALTALLYAENTDAAQLWADKLAAGIGAGEGEAGYAGPRTVAALRRG
DLTTAVQAAGAVLDRGRPSSLGITAVLPLSGAVAAAIRLGELERAEKWLA
EPLPEAVHDSLFGLHLLMARGRYSLAVGRHEAAYAAFRDCGERMRRWDVD
VPGLALWRVDAAEALLPGDDRAEGRRLIDEQLTRPMGPRSRALTLRVRAA
YAPPAKRIDLLDEAADLLLSSNDQYERARVLADLSEAFSALRQNGRARGI
LRQARHLAAQCGAVPLLRRLGVKAGRSGRLGRPPQGIRSLTEAERRVATL
AAAGQTNREIADQLFVTASTVEQHLTNVFRKLGVKGRQQLPAELADLRPP
G

SEQ ID NO: 206

MYSGTCREGYELVAREDELGILQRSLEQASSGQGVVVTVTGPIACGKTEL
LDAAAAKAEAIILRAVCAPEERAMPYAMIGQLIDDPALAHRAPGLADRIA
QGGQLSLRAENRLRRDLTRALLALAVDRPVLIGVDDVHHADTASLNCLLH
LARRVRPARISMIFTELRSLTPTQSRFKAELLSLPYHHEIALRPFGPEQS
AELARAAFGPGLAEDVLVGLYKTTRGNLSLSRGLISDVREALANGESAFE
AGRAFRLAYLGSLYRCGPVALRVARVAAVLGPSATTTLVRRLSGLSAETI
DRATKILTEGGLLLDQQFPHPAARSVVLDDMSAQERRGLHTLALELLDEA
PVEVLAHHQVGAGLIHGPKAAEMFAKAGKALVVRNELGDAAEYLQLAHRA
SDDVSTRAALRVEAVAIERRRNPLASSRHMDELSAAGRAGLLSPKHAALA
VFWLADGGRSGEAAEVLASERPLATTDQNRAHLRFVEVTLALFSPGAFGS
DRRPPPLTPDELASLPKAAWQCAVADNAAMTALHGHPELATAQAETVLRQ
ADSAADAIPAALIALLYAENTESAHIWADKLGSTNGGVSNEAEAGYAGPC
AEIALRRGDLATAFEAGSTVLDDRSLPSLGITAALLLSSKTAAAVRLGEL
ERAEKLLAEPLPNGVQDSLFGLHLLSAYGQYSLAMGRYESALRAFHTCGE
RMRSWDVDVPGLALWRVDAAEALLSLDRNEGQRLIDEQLTRPMGPRSRAL
TLRIKAAYLPRTKRIPLLHEAAELLLPCPDPYEQARVLADLGDTLSALRR
YSRARGVLRQARHLAAQCGAVPLLRRLGGEPGRIDDAGLPQRSTSLTDAE
RRVAALAAAGQTNREIAKQLFVTASTVEQHLTSVFRKLGVKGRKQLPTAL
ADVEQT

SEQ ID NO: 207

MPAVESYELDARDDELRRLEEAVGQAGNGRGVVVTITGPIACGKTELLDA
AAAKSDAITLRAVCSEEERALPYALIGQLIDNPAVASQLPDPVSMALPGE
HLSPEAENRLRGDLTRTLLALAAERPVLIGIDDMHHADTASLNCLLHLAR
RVGPARIAMVLTELRRLTPAHSQFHAELLSLGHHREIALRPLGPKHIAEL
ARAGLGPDVDEDVLTGLYRATGGNLNLGHGLIKDVREAWATGGTGINAGR
AYRLAYLGSLYRCGPVPLRVARVAAVLGQSANTTLVRWISGLNADAVGEA
TEILTEGGLLHDLRFPHPAARSVVLNDLSARERRRLHRSALEVLDDVPVE
VVAHHQAGAGFIHGPKAAEIFAKAGQELHVRGELDAASDYLQLAHHASDD
AVTRAALRVEAVAIERRRNPLASSRHLDELTVAARAGLLSLEHAALMIRW
LALGGRSGEAAEVLAAQRPRAVTDQDRAHLRAAEVSLALVSPGASGVSPG
ASGPDRRPRPLPPDELANLPKAARLCAIADNAVISALHGRPELASAEAEN
VLKQADSAADGATALSALTALLYAENTDTAQLWADKLVSETGASNEEEGA
GYAGPRAETALRRGDLAAAVEAGSAILDHRRGSLLGITAALPLSSAVAAA
IRLGETERAEKWLAEPLPEAIRDSLFGLHLLSARGQYCLATGRHESAYTA
FRTCGERMRNWGVDVPGLSLWRVDAAEALLHGRDRDEGRRLIDEQLTHAM
GPRSRALTLRVQAAYSPQAQRVDLLEEAADLLLSCNDQYERARVLADLSE
AFSALRHHSRARGLLRQARHLAAQCGATPLLRRLGAKPGGPGWLEESGLP
QRIKSLTDAERRVASLAAGGQTNRVIADQLFVTASTVEQHLTNVFRKLGV
KGRQHLPAELANAE

SEQ ID NO: 208

MPAVKRNDLVARDGELRWMQEILSQASEGRGAVVTITGAIACGKTVLLDA
AAASQDVIQLRAVCSAEEQELPYAMVGQLLDNPVLAARVPALGNLAAAGE
RLLPGTENRIRRELTRTLLALADERPVLIGVDDMHHADPASLDCLLHLAR
RVGPARIAIVLTELRRLTPAHSRFQSELLSLRYHHEIGLQPLTAEHTADL
ARVGLGAEVDDDVLTELYEATGGNPSLCCGLIRDVRQDWEAGVTGIHVGR
AYRLAYLSSLYRCGPAALRTARAAAVLGDSADACLIRRVSGLGTEAVGQA
IQQLTEGGLLRDQQFPHPAARSVVLDDMSAQERHAMYRSAREAAAEGQAD
PGTPGEPRAATAYAGCGEQAGDYPEPAGRACVDGAGPAEYCGDPHGADDD
PDELVAALGGLLPSRLVAMKIRRLAVAGRPGAAAELLTSQRLHAVTSEDR
ASLRAAEVALATLWPGATGPDRHPLTEQEAASLPEGPRLLAAADDAVGAA
LRGRAEYAAAEAENVLRHADPAAGGDAYAAMIALLYTEHPENVLFWADKL
DAGRPDEETSYPGLRAETAVRLGDLETAMELGRTVLDQRRLPSLGVAAGL
LLGGAVTAAIRLGDLDRAEKWLAEPIPDAIRTSLYGLHVLAARGRLDLAA
GRYEAAYTAFRLCGERMAGWDADVSGLALWRVDAAEALLSAGIRPDEGRK
LIDDQLTREMGARSRALTLRAQAAYSLPVHRVGLLDEAAGLLLACHDGYE
RARVLADLGETLRTLRHTDAAQRVLRQAEQAAARCGSVPLLRRLGAEPVR
IGTRRGEPGLPQRIRLLTDAERRVAAMAAAGQTNREIAGRLFVTASTVEQ
HLTSVFRKLGVKGRRFLPTELAQAV

SEQ ID NO: 209

MYSGTCREGYELVAREDELGILQRSLEQASSGQGVVVTVTGPIACGKTEL
LDAAAAKAEAIILRAVCAPEERAMPYAMIGQLIDDPALAHRAPGLADRIA
QGGQLSLRAENRLRRDLTRALLALAVDRPVLIGVDDVHHADTASLNCLLH
LARRVRPARISMIFTELRSLTPTQSRFKAELLSLPYHHEIALRPFGPEQS
AELARAAFGPGLAEDVLAGLYKTTRGNLSLSRGLISDVREALANGESAFE
AGRAFRLAYLSSLYRCGPVALRVARVAAVLGPSATTTLVRRLSGLSAETI
DRATKILTEGGLLLDQQFPHPAARSVVLDDMSAQERRSLHTLALELLDEA
PVEVLAHHQVGAGLIHGPKAAEMFAKAGKALVVRNELGDAAEYLQLAHRA
SDDVSTRAALRVEAVAIERRRNPLASSRHMDELSAAGRAGLLSPKHAALA
VFWLADGGRSGEAAEVLASERPLATTDQNRAHLRFVEVTLALFSPGAFGS
DRRPPPLTPDELASLPKAAWQCAVADNAAMTALHGHPELATAQAETVLRQ
ADSAADAIPAALIALLYAENTESAHIWADKLGSTNAGVSNEAEAGYAGPC
AEIALRRGDLATAFEAGSAVLDDRSLPSLGITAALLLSSKTAAAVRLGEL
ERAEKLLAEPLPNGVQDSLFGLHLLSAYGQYSLAMGRYESAHRAFRTCGE
RMRSWDVDVPGLALWRVDAAEALLSLDRNEGQRLIDEQLTRPMGPRSHAL
TLRIKAAYLPRTKRIPLLHEAAELLLPCPDPYEQARVLADLGDTLSALRR
YSRARGVLRQARHLATQCGAVPLLRRLGGEPGRIDDAGLPQRSTSLTDAE
RRVAALAAAGQTNREIAEQLFVTASTVEQHLTSVFRKLGVKGRKQLPTAL
ADVEQT

SEQ ID NO: 210

MYSGTCREGYELVAREDELGILQRSLEEAGSGQGAVVTVTGPIACGKTEL
LDAAAAKADAIILRAVCAPEERAMPYAMIGQLIDDPALAHRAPELADRIA
QGGHLSLRAENRLRRDLTRALLALAVDRPVLIGVDDVHHADTASLNCLLH
LARRVRPARISMIFTELRSLTPTQSRFKAELLSLPYHHEIALRPLGPEQS
AELAHAAFGPGLAEDVLAGLYGMTRGNLSLSRGLISDVREAQANGESAFE
VGRAFRLAYLSSLYRCGPIALRVARVAAVLGPSATTTLVRRLSGLSAETI
DRATKILTEGGLLLDHQFPHPAARSVVLDDMSAQERRSLHTLALELLDEA
PVEVLAHHQVGAGLIHGPKAAEIFARAGQALVVRNELGDAAEYLQLAHRA
SDDVSTRAALRVEAVAIERRRNPLASSRHMDELSAAGRAGLLSPKHAALA
VFWLADGGRSGEAAEVLASEHPLATTDQNRAHLRFAEVTLALFCPGAFGS
DRRPPPLAPDELASLPKAAWQCAVADNAVMTALHAHPELATAQAETVLRQ
ADSAADAIPAALIALLYAENTESAQIWADKLGSTNAGVSNEAEAGYAGPC
AEIALRRGDLATAFEAGGTVLDDRPLPSLGITAALLLSSKTAAAVRLGEL
ERAEKLLAEPLPNGVQDSLFGLHLLSAHGQYSLAMGRYESAHRAFHTCGE
RMRSWGVDVPGLALWRVDAAEALLSLDRNEGQRLIDEQLARPMGPRSRAL
TLRIKAAYLPRTKRIPLLHEAAELLLSCPDPYEQARVLADLGDTLSALRR
YSRARGVLRQARHLATQCGAVPLLRRLGGEPGRIDDAGLPQRSTSLTDAE
RRVSALAAAGQTNREIAKQLFVTASTVEQHLTSVFRKLGVKGRRQLPTAL
ADVE

SEQ ID NO: 211

MYSGTCREGYELVAREDELGILQRSLEQASSGQGVVVTVTGPIACGKTEL
LDAAAAKAEAIILRAVCAPEERAMPYAMIGQLIDDPALAHRAPGLADRIA
QGGQLSLRAENRLRRDLTRALLALAVHRPVLIGVDDVHHADTASLNCLLH
LARRVRPARISMIFTELRSLTPTQSRFKAELLSLPYHHEIALRPFGPEQS
AELARAAFGPGLAEDVLAGLYKTTRGNLSLSRGLISDVREALANGESAFE
AGRAFRLAYLSSLYRCGPVALRVARVAAVLGPSATTTLVRRLSGLSAETI
DRATKILTEGGLLLDQQFPHPAARSVVLDDMSAQERRGLHTLALELLDEA
PVEVLAHHQVGAGLIHGPKAAEMFAKAGKALVVRNELGDAAEYLQLAHRA
SDDVSTRAALRVEAVAIERRRNPLASSRHMDELSAAGRAGLLSPKHAALA
VFWLADGGRSGEAAQVLASERPLATTDQNRAHLRFVEVTLALFSPGAFGS
DRRPPPLTPDELASLPKAAWQCAVADNAAMTALHGHPELATAQAETVLRQ
ADSAADAIPAALIALLYAENTESAHIWADKLGSMNAGVSNEAEAGYAGPC
AEIALRRGDLATAFEAGSTVLDDRSLPSLGITAALLLSSKTAAAVRLGEL
ERAEKLLAEPLPNGVQDSLFGLHLLSAYGQYSLAMGRYESAHRAFRTCGE
RMRSWDVDVPGLALWRVDAAEALLSLDRNEGQRLIDEQLTRPMGPRSRAL
TLRIKAAYLPRTKRIPLLHEAAELLLPCPDPYEQARVLADLGDTLSALRR
YSRARGVLRQARHLATQCGAVPLLRRLGGEPGRIDDAGLPQRSTSLTDAE
RRVAALAAAGQTNREIAEQLFVTASTVEQHLTSVFRKLGVKGRKQLPTAL
ADVEQT

SEQ ID NO: 212

MRAINASDTGPELVAREDELGRVRSALNRANGGQGVLISITGPIACGKTE
LLEAAASEVDAITLRAVCAAEERAIPYALIGQLIDNPALGIPVPDPAGLT
AQGGRLSSSAENRLRRDLTRALLTLATDRLVLICVDDVQHADNASLSCLL
YLARRLVPARIALVFTELRVLTSSQLRFNAELLSLRNHCEIALRPLGPGH
AAELARATLGPGLSDETLTELYRVTGGNLSLSRGLIDDVRDAWARGETGV
QVGRAFRLAYLGSLHRCGPLALRVARVAAVLGPSATSVLVRRISGLSAEA
MAQATDILADGGLLRDQRFTHPAARSVVLDDMSAEERRSVHSLALELLDE
APAEMLAHHRVGAGLVHGPKAAETFTGAGRALAVRGMLGEAADYLQLAYR
ASGDAATKAAIRVESVAVERRRNPLVVSRHWDELSVAARAGLLSCEHVSR
TARWLTVGGRPGEAARVLASQHRRVVTDQDRAHLRVAEFSLALLYPGTSG
SDRRPHPLTSDELAALPTATRHCAIADNAVMAALRGHPELATAEAEAVLQ
QADAADGAALTALMALLYAESIEVAEVWADKLAAEAGASNGQDAEYAGIR
AEIALRRGDLTAAVETAGMVLDGRPLPSLDITATLLLAGRASVAVRLGEL
DHAEELFAAPPEDAFQDSLFGLHLLSAHGQYSLATGRPESAYRAFRACGE
RMRDWGFDAPGVALWRVGAAEALLGLDRNEGRRLIDEQLSRTMAPRSHAL
TLRIKAAYMPEPKRVDLLYEAAELLLSCRDQYERARVLADLGEALSALGN
YRQARGVLRQARHLAMRTGADPLLRRLGIRPGRQDDPDPQPRSRSLTNAE
RRAASLAATGLTNREIADRLFVTASTVEQHLTNVFRKLGVKGRKQLPAEL
DDME

### LAL Binding Sites

[0097] In some embodiments, a gene cluster (e.g., a PKS gene cluster) includes one or more promoters that include one or more LAL binding sites. The LAL binding sites may include a polynucleotide consensus LAL binding site sequence (e.g., as described herein). In some instances, the LAL binding site includes a core AGGGGG (SEQ ID NO: 213) motif. In certain instances, the LAL binding site includes a sequence having at least 80% (e.g., 80%, 85%, 90%, 95%, 97%, 98%, 99%, or 100%) homology to SEQ ID NO: 213. The LAL binding site may include mutation sites that have been restored to match the sequence of a consensus or optimized LAL binding site. In some embodiments, the LAL binding site is a synthetic LAL binding site. In some embodiments, synthetic LAL binding sites may be identified by (a) providing a plurality of synthetic nucleic acids including at least eight nucleotides; (b) contacting one or more of the plurality of nucleotides including at least eight nucleotides with one or more LALs; (c) determining the binding affinity between a nucleic acid of step (a) and an LAL of step (b), wherein a synthetic nucleic acid is identified as a synthetic LAL binding site if the affinity between the synthetic nucleic acid and an LAL is greater than X. The identified synthetic LAL binding sites may then be introduced into a host cell in a compound-producing cluster (e.g., a PKS cluster).

[0098] In some embodiments, a pair of LAL binding site and a heterologous LAL or a heterologous LAL binding site and an LAL that have increased expression compared to a natural pair may be identified by (a) providing one or more LAL binding sites; (b) contacting one or more of the LAL binding sites with one or more LALs; (c) determining the binding affinity between a LAL binding site and an LAL, wherein a pair having increased expression is identified if the affinity between the LAL binding site and the LAL is greater than the affinity between the LAL binding site and its homologous LAL and/or the LAL at its homologous LAL binding site. In some embodiments, the binding affinity between the LAL binding site and the LAL is determined by determining the expression of a protein or compound by a cell which includes both the LAL and the LAL binding site.

### Constitutively Active LALs

[0099] In some embodiments, the recombinant LAL is a constitutively active LAL. For example, the amino acid sequence of the LAL has been modified in such a way that it does not require the presence of an inducer compound for the altered LAL to engage its cognate binding site and activate transcription of a compound producing protein (e.g., polyketide synthase). Introduction of a constitutively active LAL to a host cell would likely result in increased expression of the compound-producing protein (e.g., polyketide synthase) and, in turn, increased production of the corresponding compound (e.g., polyketide).

### Engineering Unidirectional LALs

[0100] FK gene clusters are arranged with a multicistronic architecture driven by multiple bidirectional promoter-operators that harbor conserved (in single or multiple, and inverted to each other and/or directly repeating) GGGGGT (SEQ ID NO: 179) motifs presumed to be LAL binding sites. Bidirectional LAL promoters may be converted to unidirectional ones (UniLALs) by strategically deleting one of the opposing promoters, but maintaining the tandem LAL binding sites (in case binding of LALs in the native promoter is cooperative, as was demonstrated for MalT). Functionally this is achieved by removal of all sequences 3′ of the conserved GGGGGT (SEQ ID NO: 179) motif present on the antisense strand (likely containing the −35 and −10 promoter sequences), but leaving intact the entire sequence on the sense strand. As a consequence of this deletion, transcription would be activated in one direction only. The advantages of this feed-forward circuit architecture would be to tune and/or maximize LAL expression during the complex life cycle of Streptomyces vegetative and fermentation growth conditions

### Host Cells

[0101] In some embodiments, the host cell is a bacteria such as an Actiobacterium. For example, in some embodiments, the host cell is a Streptomyces strain. In some embodiments, the host cell is Streptomyces anulatus, Streptomyces antibioticus, Streptomyces coelicolor, Streptomyces peucetius, Streptomyces sp. ATCC 700974, Streptomyces canus, Streptomyces nodosus, Streptomyces (multiple sp.), Streptoalloteicus hindustanus, Streptomyces hygroscopicus, Streptomyces avermitilis, Streptomyces viridochromogenes, Streptomyces verticillus, Streptomyces chartruensis, Streptomyces (multiple sp.), Saccharothrix mutabilis, Streptomyces halstedii, Streptomyces clavuligerus, Streptomyces venezuelae, Strteptomyces roseochromogenes, Amycolatopsis orientalis, Streptomyces clavuligerus, Streptomyces rishiriensis, Streptomyces lavendulae, Streptomyces roseosporus, Nonomuraea sp., Streptomyces peucetius, Saccharopolyspora erythraea, Streptomyces filipinensis, Streptomyces hygroscopicus, Micromonospora purpurea, Streptomyces hygroscopicus, Streptomyces narbonensis, Streptomyces kanamyceticus, Streptomyces coffinus, Streptomyces lasaliensis, Streptomyces lincolnensis, Dactosporangium aurantiacum, Streptomyces toxitricini, Streptomyces hygroscopicus, Streptomyces plicatus, Streptomyces lavendulae, Streptomyces ghanaensis, Streptomyces cinnamonensis, Streptomyces aureofaciens, Streptomyces natalensis, Streptomyces chattanoogensis L10, Streptomyces lydicus A02, Streptomyces fradiae, Streptomyces ambofaciens, Streptomyces tendae, Streptomyces noursei, Streptomyces avermitilis, Streptomyces rimosus, Streptomyces wedmorensis, Streptomyces cacaoi, Streptomyces pristinaespiralis, Streptomyces pristinaespiralis, Actinoplanes sp. ATCC 33076, Streptomyces hygroscopicus, Lechevalieria aerocolonegenes, Amycolatopsis mediterranei, Amycolatopsis lurida, Streptomyces albus, Streptomyces griseolus, Streptomyces spectabilis, Saccharopolyspora spinosa, Streptomyces ambofaciens, Streptomyces staurosporeus, Streptomyces griseus, Streptomyces (multiple species), Streptomyces acromogenes, Streptomyces tsukubaensis, Actinoplanes teichomyceticus, Streptomyces glaucescens, Streptomyces rimosus, Streptomyces cattleya, Streptomyces azureus, Streptoalloteicus hindustanus, Streptomyces chartreusis, Streptomyces fradiae, Streptomyces coelicolor, Streptomyces hygroscopicus, Streptomyces sp. 11861, Streptomyces virginiae, Amycolatopsis japonicum, Amycolatopsis balhimycini, Streptomyces albus J1074, Streptomyces coelicolor M1146, Streptomyces lividans, Streptomyces incarnates, Streptomyces violaceoruber, or Streptomyces griseofuscus. In some embodiments, the host cell is an Escherichia strain such as Escherichia coli. In some embodiments, the host cell is a Bacillus strain such as Bacillus subtilis. In some embodiments, the host cell is a Pseudomonas strain such as Pseudomonas putitda. In some embodiments, the host cell is a Myxococcus strain such as Myxococcus xanthus.

### EXAMPLES

### Example 1. Single Module Swapping to Produce an Engineered PKS

[0102] Inter-module residue covariation analysis and evolutionary trace analysis were used to predict 10 heterologous donor modules that would successfully replace module 3 of the PKS that produces Compound 1 (FIG. 3A). Seven of the 10 predicted donor modules, ranging in length from 4-6 kb, were selectively amplified in their entirety using a GC-rich long PCR method. In parallel, a bacterial artificial chromosome (BAC) that harbored the PKS that produces Compound 1 was converted to a module swap acceptor for heterologous donor modules by introducing the restriction sites AflII and SpeI to the flanking intermodule sequence of module 3. The modified acceptor BAC was linearized by digestion with AflII and SpeI, and the 7 donor modules were gel-purified and subcloned by Gibson cloning. The resulting constructs were subjected to Sanger sequencing of region of interest, PCR-based analysis to confirm cluster integrity, and Illumina NGS to sequence the entire BAC. The PCR-mediated error rate of the module amplification protocol was determined to be approximately 1 bp per 5000 bp, or approximately 1 mutation per module.

[0103] A single module was swapped to produce an engineered PKS by replacing module 3 of the PKS that produces Compound 1 with module 3 of Streptomyces strain S317. The donor S317 module 3 was PCR amplified and Gibson cloned into position 3 of the PKS that produces Compound 1 (FIG. 3B). The resulting clone was conjugated into a Streptomyces expression host and fermented. Production of compound was analyzed by LC-TOF mass spectrometry analysis by co-injecting purified native FKBP12, the protein to which both compounds are expected to bind, with either the product of the native PKS, Compound 1, or the compound produced by the engineered PKS cluster, Compound 2. Comparative LC-TOF analysis of indicated that Compound 2 had the expected mass of 611.38, corresponding to the conversion of the module 3 alkene to a fully reduced module at that position. Compound 2 was re-fermented at large scale, purified to homogeneity and the structure was confirmed by NMR spectroscopy.

[0104] To replace module 4 in the PKS that produces Compound 1, module swapping prediction algorithms based on inter-module covariation were used to generate a list of 16 modules encoding 4 chemistries. Gibson-based subcloning into module 4 was not as efficient as module 3. Gibson cloning, which involves a ssDNA intermediate, is difficult in high GC-rich regions, and direct ligation of donor modules to restriction sites with 4 bp overhangs may not be sensitive to local GC content. Therefore AM and SpeI sites were introduced at new positions in the inter-module flanking region to generate a direct ligation acceptor BAC. This direct ligation acceptor BAC was linearized by digestion with AflII and SpeI, and 12 donor modules were gel-purified, digested with AflII and XbaI and subcloned by ligation.

[0105] Single module swaps of either module 3 or module 4 in the PKS that produces Compound 1 generated novel Compounds 2-5 (FIG. 3C). Therefore, single module swapping was used to introduce a range of module encoded chemistries and generate novel compounds. LC-TOF mass spectrometry analysis indicated that of the module swaps at module 3 and module 4, the resulting hybrid clusters yielded a range of compound expression.

### Example 2. Library Construction by Combinatorial Dimodule Swapping

[0106] Pooled transfer of dimodule libraries was used to simultaneously replace modules 3 and 4 in the PKS that produces Compound 1 and generate a plurality of engineered PKS clusters (FIG. 4A). A total of 31 modules were amplified for transfer to the module 3 position and 25 modules for the module 4 position. To optimize Gibson dimodule assembly cloning, phosphothiorate-modified DNA oligos were synthesized for PCR amplification of the donor modules. Phosphothiorate-capped module ends function by constraining the exonuclease step of the Gibson cloning protocol, which resulted in a dramatic increase in Gibson capture of GC-rich DNA (FIG. 4B). An intermediate plasmid-based dimodule capture protocol was developed to assemble, capture, amplify, and enrich the dimodule units (FIG. 4C). Pooled module 3 and module 4 amplicons were mixed with a linear backbone amplicon based on pBR322 for a 3-part Gibson assembly reaction. Shuttle vectors containing dimodule assemblies could be resolved from empty vector by fractionating on a preparative 0.4% agarose gel. After dimodule capture, the assembled dimodule fragments were released from the shuttle vector by digestion with AflII and XbaI and subcloned by direct ligation to an expression vector containing the PKS that produces Compound 1, in which the PKS lacked the native module 3 and module 4.

[0107] Replicate BACs encoding single module and dimodule swaps were conjugated to optimized Streptomyces producer strain S2441 and solid-phase extracted samples were subjected to LC-TOF mass spectrometry with the expected protein binding partner, purified FKBP12 protein. Further analysis confirmed that dimodule library generation is capable of engineering PKS clusters that express novel compounds in high yield (FIG. 4D). As a representative example, Compound 6 was generated by dimodule swapping of a module encoding mDEK chemistry at module 3 and K chemistry at module 4 of the PKS tha produced Compound 1. The expected mass of Compound 6 was observed by LC-TOF analysis, confirming that the dimodule assembly protocol yields engineered derivatives Compound 1.

[0108] A 650-member combinatorial library of engineered derivatives of the PKS that produces Compound 1 was produced by dimodule swapping. A total of 31 modules were amplified for transfer the module 3 position and 25 modules for the module 4 position of the PKS that produces Compound 1 (FIG. 4E). Clusters were cloned onto BACs, and the cloned BACs were subsequently used as templates to PCR modules of diverse sources from multiple heterologous donors.

[0109] A subset of the library corresponding to 15 different donor modules at the module 3 position and 15 different donor modules at the module 4 position produced a potential combinatorial library of 225 novel PKS clusters and resulting novel compounds (the 15×15 dimodule library). Because the dimodule library was assembled as a pool, rarefaction analysis was performed to determine how many clones needed to be conjugated, fermented, and extracted to effectively sample >90% of the diversity of the library. Rarefaction analysis indicated that 650 clones corresponded to a statistical sampling >90% of the dimodule library (FIG. 4F). 650 clones were prosecuted and subjected to LC-TOF mass spectrometry analysis. 115 of the 650 sampled clones expressed compounds with novel masses.

### Example 3. Characterization of a Combinatorial Dimodule Library by Single-Molecule Long-Read Sequencing

[0110] A library corresponding to 15 different donor modules at the module 3 position and 15 different donor modules at the module 4 position (the 15×15 dimodule library), produced according to the methods of Example 2, was characterized by Nanopore sequencing (FIG. 4G). The dimodules present in the 15×15 dimodule library were excised from the PKS clusters using CRISPR/Cas9 (NEB). The resulting excised dimodules each had a length of approximately 7-12 kilobases. The dimodules were purified by 96-well column purification, and well-specific adaptors were ligated to the dimodules. The resulting dimodules were normalized and pooled and prepared for sequencing according to the standard ligation preparation protocol for Nanopore sequencing of oligonucleotides. Nine 96-well plates (864 dimodule clones total) were sequenced by Nanopore and the resulting sequencing data was analyzed according to the informatics workflow provided in FIG. 4H, with 73.1% of clones being called. The comparison of the resulting sequencing data against the table of input of the donor modules allows the deconvolution of the resulting combinatorial library by identification of the resulting dimodules. The results of Nanopore sequencing of the 15×15 dimodule library are provided in Table 1.

TABLE 1

| Library | | | Single | | Grand |
|---|---|---|---|---|---|
| Plate IDs | NoCall | Ambiguous | Read | Called | Total |
| 163846 | 45 | 4 | 11 | 36 | 96 |
| 163848 | 14 | 10 | 14 | 58 | 96 |
| 163851 | | 16 | | 80 | 96 |
| 163896 | 5 | 8 | 5 | 78 | 96 |
| 163897 | | 21 | 1 | 74 | 96 |
| 163898 | 3 | 10 | 11 | 72 | 96 |
| 163899 | 4 | 6 | 2 | 84 | 96 |
| 163900 | 1 | 26 | 3 | 66 | 96 |
| 50066321 | | 12 | | 84 | 96 |
| Grand Total | 72 | 113 | 47 | 632 | 864 |
| % | 8.3% | 13.1% | 5.4% | 73.1% | |

### Example 4. Library Construction by Combinatorial Trimodule Swapping

[0111] The combinatorial module swap protocols were modified to generate trimodule assemblies in the PKS that produces Compound 7 (FIG. 5A). Increasing the number of module swaps increases the size, and therefore diversity, of a PKS library. For example, given a collection of 13 different module-encoded chemistries, increasing size and diversity is based on the number of modules that are swapped such that the maximal library size of a single mod swap is 13; with a dimodule swap the maximal library size is 13²=169; and for a trimodule swap, the maximal library is 13³=2197.

[0112] Trimodule assembly leverages the technical advances of the dimodule protocol with an additional “proof-reading” Gibson cloning step to insert the captured trimodule assembly into the PKS that produces Compound 7 (FIG. 5B). As before, phosphorothioate chemistry was used to constrain the ssDNA intermediate for the first round of Gibson cloning into a shuttle vector. Shuttle vector clones harboring trimodule assemblies were enriched by preparative gel fractionation and isolation. Finally, Gibson-mediated “error correction” was used to trim restriction sites for scarless cloning in the expression vector. First, flanking PmeI restriction sites were introduced within the linker regions between Module 3 and Module 4, as well as between Module 6 and Module7. Sites with reduced GC content and secondary structure (as predicted by DNAfold; <8 kcal/ml) were selected for optimal Gibson homology arms. A Gibson Assembly Ultra Kit (SGI-DNA) was used to clone the trimodule assembly into the PKS that produces Compound 7 enabling the replacement of Modules 4, 5, and 6 and simultaneously removal of the additional extraneous PmeI sequence retained after digestion. This resulted in >95% correct assembly for the industrial scale production of compounds produced by trimodule swapped PKS clusters (>200 per week).

### Example 5. Ring Expansion by Swapping a Single Module Acceptor with a Dimodule Donor

[0113] A heterologous dimodule donor assembly encoding mDEK chemistry and K chemistry was swapped into module 3, a single module acceptor, of the PKS that produces Compound 1 by the methods described above (FIG. 6A). The compound produced by engineered PKS, Compound 8, was observed in high yield and had a mass of 655.41, as determined by LC-TOF analysis (FIG. 6B). This corresponds to a ring-expanded compound product in which Compound 8 contains an additional 2-carbon extender unit. Thus reprogramming PKS biosynthesis via module swapping by insertion of a dimodule assembly to replace a single module may produce functional PKS expression.

### Example 6. Module Swapping of a PKS Loading Module

[0114] Rapamycin is a natural product synthesized by a mixed polyketide synthase (PKS)/nonribosomal peptide synthetase (NRPS) system. Rapamycin shares a common structural motif with related natural product FK506 which is responsible for binding to FK506-binding proteins (FKBPs). During biogenesis of Rapamycin, loading modules bind and load a 4,5-dihydroxycyclohexa-1,5-dienecarboxylic acid starter unit via a CaiC domain, which functions as a carboxylic acid ligase (CL) like domain (FIG. 7A). Loading modules may possess similar domain structure as conventional elongation PKS modules, including ketoreductase-like domains and an enoyl-reductase domain, which may or may not be catalytically active. The final chemistry of the starter unit depends on the presence and the sequence of the domains in the loading module, so the resulting “starter unit” can be engineered by swapping the loading module

[0115] The X23 PKS cluster produces Compound 9 and Compound 10 (FIG. 7B). The Rapamycin loading module from Streptomyces stain S303 was swapped into the X23 cluster by the methods described previously for a single module swap. The engineered PKS produced Compounds 11 and 12, in which the starter unit is replaced with the starter unit of Rapamycin. Additional single elongation module swaps of Module 2 and Module 7 of X23 produced Compounds 13 and 14, respectively.

### Other Embodiments

[0116] It is to be understood that while the present disclosure has been described in conjunction with the detailed description thereof, the foregoing description is intended to illustrate and not limit the scope of the present disclosure, which is defined by the scope of the appended claims. Other aspects, advantages, and alterations are within the scope of the following claims.

[0117] Those skilled in the art will recognize, or be able to ascertain using no more than routine experimentation, many equivalents to the specific embodiments in accordance with the invention described herein. The scope of the present invention is not intended to be limited to the above Description, but rather is as set forth in the appended claims.

[0118] In the claims, articles such as “a,” “an,” and “the” may mean one or more than one unless indicated to the contrary or otherwise evident from the context. Claims or descriptions that include “or” between one or more members of a group are considered satisfied if one, more than one, or all of the group members are present in, employed in, or otherwise relevant to a given product or process unless indicated to the contrary or otherwise evident from the context. The invention includes embodiments in which exactly one member of the group is present in, employed in, or otherwise relevant to a given product or process. The invention includes embodiments in which more than one, or all of the group members are present in, employed in, or otherwise relevant to a given product or process.

[0119] It is also noted that the term “comprising” is intended to be open and permits but does not require the inclusion of additional elements or steps. When the term “comprising” is used herein, the term “consisting of” is thus also encompassed and disclosed.

[0120] Where ranges are given, endpoints are included. Furthermore, it is to be understood that unless otherwise indicated or otherwise evident from the context and understanding of one of ordinary skill in the art, values that are expressed as ranges can assume any specific value or subrange within the stated ranges in different embodiments of the invention, to the tenth of the unit of the lower limit of the range, unless the context clearly dictates otherwise.

[0121] In addition, it is to be understood that any particular embodiment of the present invention that falls within the prior art may be explicitly excluded from any one or more of the claims. Since such embodiments are deemed to be known to one of ordinary skill in the art, they may be excluded even if the exclusion is not set forth explicitly herein. Any particular embodiment of the compositions of the invention (e.g., any polynucleotide or protein encoded thereby; any method of production; any method of use) can be excluded from any one or more claims, for any reason, whether or not related to the existence of prior art.

The application's sequence listing, which the Patent Office published only in electronic form, follows.

SEQUENCE LISTING (204 sequences)

SEQ ID NO: 1 - protein, 920 aa, Streptomyces malaysiensis
QPLAIVGMACRLPGGVSSPEDLWRLVESGTDAISGFPVDRGWDVDGLYDPDPDVPGKSYTVEGGFLDAVTGFDAPFFGISPREALAMDPQQRLVLEASWEAFERAGIEPGSVRGSDTGVFMGAFPGGYGTGADLGGFGMTGGAASVLSGRVSYFFGLEGPAMTVDTVCSSSLVALHQAGYALRHGECSLALVGGVTVMSTPQTFVEFSRQRGLAADGRCKAFSDDADGTGWSEGVGVLLVERLSDAQARGHNILAVVRGSAVNQDGASNGLTAPNGPSQQRVIRQALANAGLTGADVDVVEAHGTGTTLGDPIEAQAVIATYGQDRDQPVLLGSLKSNLGHTQAAAGVSGVIKMVMALQNGVVPRTLHVEEPSRHVDWTAGAVELVTENQPWPELGRARRAAVSSFGLSGTNAHVILESAPDQPPAPSTDSPVSAVTAGVVPLPISAKTLPALADLEDRLRTYLTTTPDTDLPAVASTLATTRSLFEHRAVLLGEDTVTGTAIPDPRVVFVFPGQGWQWQGMGSALLTSSTVFAERMAECAAALSEFVDWDLLTVLDDPSVVDRVDVVQPACWAVMISLAAVWQAAGIHPDIVLGHSQGEIAAACLAGAISLPDAARIVAQRSQLIAHQLGHGAMASISLPADDIPTTDQVWIAAHNGTSTVIAGDPQAVEAVLATCETRGARVRKINVDYASHTPHVEQIRTELLDITTGIEAHTPAVPWLSTTDNTWIDQPLDPTYWYRNLREPVRFGPAIDLLQTQDNNLFIEISASPVLLQTMDNAATVATLRRDEDTTHRLLTAFAEAHVHGATINWPTVLDTTTTPVDLPTYPFQRQRYWATSNGHPADLTPEALLKVVRDSAAMVLGHASADTVPTATAFQELGLDSLTAVELRNSLTKATGLRLPATMAFDYPTPDALAARL

SEQ ID NO: 2 - protein, 943 aa, Streptomyces malaysiensis
EPLAIVGMACRLPGGVSSPEDLWRLVESGTDAITDFPTDRGWDTDTLFDPDPDTPGKTYTVHGGFLDDVAGFDAPFFGISPREAVAMDPQQRLVLESSWEAFERAGIQPDSIRGSDTGVFMGAYPDGYGIGADLAGFGVTAGAGSVLSGRVSYFFGLEGPAMTVDTACSSSLVALHQAAYALRQGECSLALVGGVTVMPSPRTFIEFSRQRGLAADGRSKAFADAADGTGFSEGVGVLLVERLSDAQAKGHNILALVRSSAVNQDGASNGLTAPNGPSQQRVIQSALAGAGLTSADVDVVEAHGTGTTLGDPIEAQAVLATYGQDRDRPVLLGSLKSNLGHTQAAAGVSGVIKMVMALQHNTVPATLHVDAPSRHVDWTAGAVRLATENQPWPETNRPRRAGVSSFGVSGTNAHVILEQAPAASPVEPVDTTDVVVPLVVSARSSGSLSDQADRLAALVGSPDAPALTSLADALLTRRTVFSQRAVVVAGSHEQAAAGLRALAAGDSHPALVTGAAGPARVVLVFPGQGSQWAGMGAELLDASPVFAARIAECAEALRPWVDWSLDEVLRGDASADVLGRVDVVQPASFAVMVGLAAVWESAGVRPDAVLGHSQGEIAAAYVAGALSLTDAAKIVAVRSRLIAARLGRGGMASVALAPEEAAKLGRTELAAVNSPASVVIAGDAEALDETLAMLEGEGVRVRRVAVDYASHTPHVEELEQSMAEALADVRSRQPRVRFLSTVTGDWVTEAGALDGGYWYRNLRQPVRFGPAVASLAEAGYTVFVEASAHPVLVQPVAETLDRTDAVVTGTLRRQDGGLPRLLTSMAELFVGGVPVNWPVLLPAGAVRGWVDLPTYAFDHQRYWLENRELTPEALLKLVCGRAAAVLGHVDADAVPVAAAFRDLGVDSLTAVELRNSLAKATGLRLPATLVFDYPTPTVLAGRL

SEQ ID NO: 3 - protein, 891 aa, Streptomyces malaysiensis
EPLAIVGMACRLPGGVLSPEDLWRLVESGGDAISGFPVDRGWDVENLFDPDPDAAGRTYAVRGGFLDGAAGFDASFFGISPREAQAMDPQQRLVLEVSWEAFERAGIEPGSVRGSDTGVFMGAYPGGYGMGTDLGGFGMTSVAVSVLAGRVSYFFGLEGPAMTVDTACSSSLVALHQAGSALRQGECSLALVGGVTVMPTPQTFVEFSRQRGLAADGRCKAFADAADGTGFSEGVGVLLVERLSDAQARGHNILAVVRGSAVNQDGASNGLTAPNGPSQQRVIQSALAGAGLTSADVDVVEAHGTGTTLGDPIEAQAVIATYGQDRDQPVLLGSLKSNLGHTQAAAGVSGVIKMVMALQNGVVPRTLHIDEPSRHIDWTAGAVELVTENQSWPETGRDRRAAVSSFGISGTNAHVILESAPAQPVPPVDTPVSDVTAGVVPLPISARTVPALADLEDRLRAYLTTTPETDLPAVASTLAMTRSVFEHRAVLLGEETVTGIAVSDPRVVFVFSGQGSQRVGMGEELAAAFPLFARLHRQVWDLLDVPDLEVDDTGYVQPALFALQVALFGLLESWGVRPQAVLGHSVGEVAAGYVAGVWSLEDACTLVSARARLMQALPAGGAMVAVPVSEEQARAVLVDGVEIAAVNGPASVVLSGDESAVLRVAEGLGRWTRLSASHAFHSVRMEPMLEEFRQVASELTYREPRIVMAAGEQVTTPEYWVRQVRDTVRFGDQVAAFGDAVFLEIGPDRTLSRLIDGIAMLDGDDEVRAAVAALAVMHVQGVGVDWPAILGTTTGRVLDLPTYAFQHERYWMVIQELSPEALLKIVRDSAAMVLGHANADTVPTATAFQELGLDSLTAVELRNSLTKATGLRLPATMAFDYPTPAALAGRL

SEQ ID NO: 4 - protein, 924 aa, Streptomyces malaysiensis
EPLAIVGMACRLPGGVSTPEDLWRLVESGTDAITDFPTDRGWDTDDLFDPDPDTPGKTYTVHGGFLDDVAGFDASFFGISPREALAMDSQQRLVLEASWEAFERAGIEPGSVRGSDTGVFMGAYPDGYGIGVDLGGFGATAGAGSVLSGRLSYFFGLEGPAMTVDTACSSSLVALHQAGSALRQGECSLALVGGVTVIANPQIFVEFSRQRGLAADGRCKAFADNADGTGFSEGVGVLLVERLSDAQARGHNILALVRSSAVNQDGASNGLTAPNGPSQQRVIRQALANAGLTGAEVDVVEAHGTGTTLGDPIEAQAVLATYGQDRDQPVLLGSLKSNLGHTQAAAGVSGVIKMVMALRHDTVPATLHIDEPSRHIDWTAGAVELVTENQPWPVLDRPRRAAVSAFGVSGTNAHVILESAPDQPPASATDTPAPAVTAGVVPLPISAKTVPALADLEDRLRAYLTTTPETDLPAVASTLATTRSLFEHRAVLLGEDTVTGTTIPDPRIVFVFPGQGWQWQGMGSALLTSSTVFAERMAECAAALSEFVDWDLLTVLDDPSIVDRVDVVQPACWAVMISLAAVWQAAGIHPDIVLGHSQGEIAAACLAGAISLPDAARIVAQRSQLIAHQLGHGAMASISLPADDIPTTDKVWIAAHNGTSTVIAGDPQAVEAILATCETRGARVRKINVDYASHTPHVEQIRTELLDITTGIEAHTPTVPWLSTTDNTWIDQPLDPTYWYRNLREPVRFGPAIDLLQTQDNNLFIEISASPVLLQTMDNATTVATLRRDEDTTQRLLTAFAEAHVHGATINWPTVLNTTTTPVDLPTYPFQRQRYWATSNDRLNGRTSVEQHRIMVELVLAHATSVLGHESPDAIAPDRAFKDLGMDSLTAIELRNHLVAETGVRLPATTAFDHPTADDLAKRL

SEQ ID NO: 5 - protein, 951 aa, Streptomyces malaysiensis
EPIAIVSMSCRAPGGVDSPESLWRLVESGTDAITDFPGDRGWDVAGLYSPDPTGYKTYCVQGGFLDAAADFDAAFFGISPREALGMDPQQRLLLETSWEAIERARIDPRSLPGRNVGVYVGGAAQGYGVGAIDQQRDNVITGSSISLLSGRLSYALGLEGPGVTVDTACSSSLVALHLACQALRQRECSMALVSGVSVIPTPDVFVEFSRQRGLAADGRCKSFSASADGTIWAEGVGVLVLERLSEATRLGHRVLAVVRGSAVNSDGASNGLTAPNGVSQQRVIRQALTGAGLTAADVDVVEAHGTGTKLGDPIEAEAILATYGQDRSTPVCLGSLKSNIGHAMAASGVLAVIKMVEAMRHGLIPRTLHVEEPSPHVDWASGDVALLTENQPWPDDAKLRRAGVSSFGLSGTNAHVVLEQYRAPAAPDITTTEHQPLAWTLSARDPKALREQAGRLHAALTESPRWRPLDIGYSLATTRSNFAHRAVAVGSDRELLRALSKLADGSAWPALVTATAKDRRVAYLFDGQGSQRPDMGSGLYERFPAFARAWDRISAEFGKHLDHSLTDVYLGRGDAATADLVDDTLYAQAGLFTMEIALFELLAEWGVRPDFVSGHSIGETAAAYAAGVLSLEDVTKLIVARGRALRQVPPGAMVALRAGEDEAREFLGRTGAALDLAAVNSPTSVVVSGASEAVAGFRARWTESGREARTLNVRHAFHSRHVEAVLGEFREVLESLTFRTPALPVVSTVTGRLIEPTELSTSEYWLRQVRQTVRFHDAVRELSGQGVGTFVEIGPSGALASAGLECLGDEASFHAVQRPGSPGDVCLMTAVAELHAGGTTVDWATVLAGGRATDLPVYPFQHGSYWLAPARPSAPEEPRTMLELVRLEAAIALSITDPGLIADDSSFLDLGFDSISALRLSNRLAAVTGLDLPPSLLFDHPTPAELAARLD

SEQ ID NO: 6 - protein, 918 aa, Streptomyces malaysiensis
EPLAIVGMACRLPGGVSSPDDLWRLVASGTDAISEFPADRGWDVDNLYDPDPDAPGKTYTVLGGFLDGVAGFDASFFGISPREALAMDPQQRLMLEVSWEAFEHAGIPPRSVRGSDTGVFMGAFPSGYNAGLEEFGMTGDAVSVLSGRVSYFFGLEGPAITVDTACSSSLVALHQASSALRQGECSLALVGGVTVLATPQTFVEFSRQRGLALDGRSKAFADAADGAGWAEGVGVLVVERLSDARAKGHQIWGVIRGSAVNQDGASNGLSAPNGPSQQRVIRQALANAGLAPHEVDVVEAHGTGTMLGDPIEAQAVIATYGQDREQPLLLGSLKSNVGHTQAAAGVSGVIKMVMALQHDTVPATLHVDAPSRHVDWTAGAVELVTENRPWPETGRVRRAGVSSFGISGTNAHVILESAPEQPASPPEAVAPVVASDRVPLVISAKTPAALAEMENRLRAYLAAAPGADPRAVASTLATARSVFEHRAVLLGENTITGTVAGADPRVVFVFPGQGWQQLGMGRALRESSPVFAARMAECAAALSEFVDWDLFTMLDDPAVIDRIDVLQPACWAVMMSLAAVWQAAGVRPDAVIGHSQGEIAAACVAGALSLRDAARIVALRSQLLAREMGHGVMAAVALPADDIPLVDGVWIGARNGPSSTVISGTPEAVEVVVAACEERGARVRRITAAVASHSPLGEKIRTELLGISASIPSRTPVVPWLSTADGIWIEAPLDPAYWWRNLREPVGFGPAVDLLQARGENVFLEMSASPVLLPAMNDAVTVATLRRDDDTPDRMLTALAEAHAHGVIVDWPRVFGSTTRVLDLPTYAFEHQRYWAVNGRPADLTPEALLKLVCGRAAAVLGHVDADAVPVAVAFRDLGVDSLTAVELRNSLAKATGLRLPATLVFDYPTPTVLAGRL

SEQ ID NO: 7 - protein, 890 aa, Streptomyces malaysiensis
  misc_feature (102)..(102): Xaa can be any naturally occurring amino acid
  misc_feature (128)..(128): Xaa can be any naturally occurring amino acid
  misc_feature (130)..(130): Xaa can be any naturally occurring amino acid
EPLAIVGMACRLPGGVLSPEDLWRLVESGGDAISGFPVDRGWDVENLFDPDPDAAGRTYAVRGGFLDGAAGFDASFFGISPREAQAMDPQQRLVLEVSWEAXERAGIEPGSVRGSDTGVFMGAYPGGXGXGTDLGGFGMTSVAVSVLAGRVSYFFGLEGPAMTVDTACSSSLVALHQAGSALRQGECSLALVGGVTVMPTPQTFVEFSRQRGLAADGRCKAFADAADGTGFSEGVGVLLVERLSDAQARGHNILAVVRGSAVNQDGASNGLTAPNGPSQQRVIRQALANAGLAGAEVDVVEAHGTGTTLGDPIEAQAVIATYGQDRDQPVLLGSLKSNLGHTQAAAGVSGVIKMVMALRHDTVPATLHIDEPSRHIDWTAGAVELVTENQSWPETGRDRRAAVSSFGISGTNAHVILESAPAQPVPPMDTPVSAVTAGVVPLPISARTVPALADLEDRLRAYLTATPETDLPAVASTLAVTRSVFEHRAVLLGEETVTGIAVSDPRVVFVFSGQGSQRVGMGEELAAAFPLFARLHRQVWDLLDVPDLEVDDTGYVQPALFALQVALFGLLESWGVRPQAVIGHSVGEVAAGYVAGVWSLEDACTLVSARARLMQALPAGGAMVAVPVSEERARAVLVDGVEIAAVNGPASVVLSGDESAVLRVAEGLGRWTRLSASHAFHSVRMEPMLEEFRQVASELTYREPRIVMAAGEQVTTPEYWVRQVRDTVRFGDQVAAFGDAVFLEIGPDRTLSRLIDGIPTLHGDDEQHAVVAALAELHVQGVPIDWSSILGVNPARVDLPTYAFQHERYWMVIQELSPEALLKIVRDSAAMMLGHPNTDAIAATTAFRDLGVDSLIAVELRNSLAKATGLRLPATLVFDYPTPTVLAGRL

SEQ ID NO: 8 - protein, 895 aa, Streptomyces malaysiensis
EPLAIVGMACRLPGGVSSPEDLWRLVESGTDAITDFPTDRGWDTDDLFDPDPDTPGKTYTVHGGFLDDVAGFDASFFGISPREAQAMDPQQRLVLEAAWEAFERAGIEPGSVRGSDTGVFMGAYPGGYGIGVDLGGFGATAGAGSVLSGRLSYFFGLEGPAMTVDTACSSSLVALHQAGSALRQGECSLALVGGVTVIANPQIFVEFSRQRGLAADGRCKAFADSADGTGWSEGVGVLLVERLSDAQARGHNILAVVRGSAVNQDGASNGLTAPNGPSQQRVIRQALANAGLAGAEVDVVEAHGTGTTLGDPIEAQAVIATYGQDRDQPVLLGSLKSNLGHTQAAAGVSGVIKMVMALQNGVVPRTLHADQPSRHIDWTAGAVELVTENQPWPELGRPRRAAVSAFGVSGTNAHVILESAPAQPVPPVDTPVSAVTAGVVPLPISARTVPALADLEDRLRAYLTATPETDLPAVASTLATTRSVFEHRAVLLGEDTVTGTAIPDPRIVFVFSGQGSQRVGMGEELAAAFPLFARLHRQVWDLLDVPDLDVDDTGYVQPALFALQVALFGLLESWGVRPQAVIGHSVGEVAAGYVAGVWSLEDACTLVSARARLMQALPAGGAMVAVPVSEEQARAVLVDGVEIAAVNGPASVVLSGDEAAVLRVAEGLGRWTRLSASHAFHSVRMEPMLEEFRQVVSRLTYREPRIVMAAGEQVTTPEYWVRQVRETVRFGDQVAAFGDAVFLEIGPDRTLSRLIDGIAMLDGDDEVRAAVAALAVMHVQGVGVDWPAILGTTTGRVLDLPTYAFQHERYWMANNGRPADLTPEALLKVVRDSAAMVLGHANADTVPAATAFQELGLDSLIAVELRNSLAKATGLRLPATMVFDYPTPAALAGRL

SEQ ID NO: 9 - protein, 899 aa, Streptomyces malaysiensis
EPLAIVGMACRLPGGVSSPEDLWRLVESGFDAITGFPTDRGWDVDNLYDPDPDAPGKSTTLHGGFLDDVAGFDASFFGISPREAVAMDPQQRLAMEVSWEAFERAGIEPGSVRGSDTGVFMGAYPGGYGIGAELGGFMLTGRAGSVLAGRVSYFFGLEGPAMTVDTACSSSLVALHQAAYALRQGECSLALVGGVTVMPTPVMFVEFSQQQNLADDGRCKAFADSADGTGWSEGVGVLLVERLSDAQARGHNILAVVRGSAVNQDGASNGLTAPNGPSQQRVIRSALTSAGLTTADVDVVEAHGTGTTLGDPIEAQAVLATYGQDRDQPVLLGSLKSNLGHTQAAAGVSGVIKMVMALQNGVVPRTLHVEEPSRHVDWTAGAVELVTENQSWPETGRARRAAVSSFGFSGTNAHVILESAPAQPVPPMDTPAPTVTTGVVPLPISAKSLPALADLEDQLRAYLTATPETDLPAVASTLAMTRSVFEHRAVLLGEETVTGTAIPDPRIVFVFSGQGSQRVGMGEELAAAFPLFARLHRQVWDLLDVPDLDVDDTGYVQPALFALQVALFGLLESWGVRPQAVIGHSVGEVAAGYVAGVWSLEDACTLVSARARLMQALPAGGAMVAVPVSEEQARAALVDGVEIAAVNGPASVVLSGDEAAVLRVAEGLGRWTRLSASHAFHSVRMEPMLEEFGQVASELTYQEPRIVMAAGEQVTTPEYWVRQVRDTVRFGDQVAAFGDAVFLEIGPDRTLSRLIDGIAMLDGDDEVRAAVAALAELHVQGVPIDWPAILGTTTGRVLDLPTYAFQHQRYWAASTWLAGLAPEEREGALMKVVRDTAAVVLGHADAGTIPVTAAFKDLGLDSLTAVELRNSLAKSTGLRLPATMVFDYPTPASLAARLD

SEQ ID NO: 10 - protein, 867 aa, Micromonospora A92-306401
EPLAIVGMACRLPGGVESPEDLWRLVESGTDAISGFPADRGWADLSLRGGFLGDAAHFDAAFFGISPREALAMDPQQRLILEASWEAFERAGIEPGSVRGSDTGVFMGAFSGGYGAGADLAGFGVTAGAVSVLSGRVSYLFGLEGPAVTVDTACSSSLVALHQAGHALRQGECSLALVGGVTVMPTPDIFVEFSRQGGLASDGRCKAFADAADGTSWSEGAGVLVVERLSDAERRGHTVLALVRGSAVNQDGASNGLTAPNGPSQQRVIQAALANAGLTPHEVDVVEAHGTGTRLGDPIEAQAVIATYGRDREHPLLLGSLKSNVGHTQAASGVSGLIKMVMALRRGTVPRTLHVDEPSRHVDWTAGAVQLAIENQPWPETGRPRRAAVSSFGVSGTNAHVILEGVPEEPADSEEPAGLTPLLISAKTPAALAEFEDRLRARLTTEPNLSAVASTLVRTRSLFDHRAVLLDGETVSGMAEPDPRVVFVFSGQGSQRAGMGDDLAAAFPVFAKIRQQVWDLLDIPDLPVDETGHAQPALFALQVALFGLLDSWGVRPDALVGHSIGELAAGYVAGIWSLEDACALVSARARLMETLPPGGVMVAVPVSEEQARAVLTDGVEIAAVNGPASVVLSGEETAVLQAAAALGGRSKRLATSHAFHSARMEPMLDEFRAVAEQLTYGSPRIPMAVGDGPDYWVRQVRDTVRFGEQVAAHDGAIFVELGPDGSLARLVDGIAVLDREDEPRAALTALARLHVRGVKVDWPIAAGRRELDLPTYPFQRQRYWAETPTARRAPTDLLTLVRDTTATVLGYPDNTAVTPTTAFTDLGIDSLTAIELRNNMATTTGLRLPATLVFDYPTPATLAARLD

SEQ ID NO: 11 - protein, 901 aa, Micromonospora A92-306401
EPLAIIGMACRLPGGVTTPEDLWQLVETGTDAISGFPTDRGWDVESLYDPDPDAAGKSYCVEGGFLDAVADFDASFFGISPREALAMDPQQRLILETSWEAFERAGIDPADARGSDTGVFMGAFTSGYGADLEGFGGTAGALSVLSGRVSYFFGLEGPAATVDTACSSSLVALHQAGYSLRHGECSLALVGGVTVMATPRTFVEFSRQRGLASDGRCKAFGDTADGTGWSEGVGVLLVERLSDAERNGHRVLAVVRSSAVNQDGASNGLTAPNGPSQQRVIQAALDNAGLAPQDVDVVEAHGTGTTLGDPIEAQAVIATYGQNREQPLLLGSLKSNVGHTQAAAGVSGVIKMIMALRHGVVPRTLHVDEPSRHVDWTAGAVHLVRENQPWPDVDRPRRAGVSSFGVSGTNAHIILESPPSQPAPEPAPALSPLVISAKTPQALAAYEDRLRTYLTAAPSTDARALAVTRSLFEHRAVLLGEDTVTGTALTEPRVVFVFPGQGWQWLGMGAALMESVVFAERMAECAAALSEFVDWNLITVLNDPAVIDQVDVVQPACWAVMVSLAAVWQAAGVRPDAVIGHSQGEIAAACVAGAISLRDAARIVALRSRLISERLGKGAMASITLPADQITLAEGAWIAAYNGPTSTVVAGTPQAIEQMHGERVRRIAVDYASHTPHVEQIRAELLDLTTDVSSQTPTLPWYSTVDGTWIDSPLDGDYWYRNLRQPVGFHPAVQTLQALGETVFVEVSASPVLLPAMDDAVTIATLRRDEGTLTRMHTALAEAHVLGVTIDWPTVLGVTTRHVDLPTYAFQRQRYWVAELASLGPAERERALRKLVSDTAAGILGHADSGTVPVTAAFRELGVDSLTAVELRNGLAKATGLRLPATMVFDYPTPQALADRL

SEQ ID NO: 12 - protein, 905 aa, Micromonospora A92-306401
EPLAIVGMACRLPGGVSSPEDLWRLVESGTDAIADFPADRGWDVESLYDPDPDAAGKSYCVRGGFLAAAAEFDAAFFGISPREALAMDPQQRLVLETSWEAFERAGIEPGSVRGSDTGVFMGAFAGGYGAAVEGFGATAGATSVLSGRVSYFFGLQGPAITVDTACSSSLVALHQAGYSLRQGECSMALVGGVTVMATPQSFVEFSRQRGLAPDGRCKAFADTADGTGWSEGVGVLLVERLSDAERNGHRVLAVVRSSAVNQDGASNGLSAPNGPAQQRVIRQALANAGLAAADVDVVEAHGTGTTLGDPIEAQAVLATYGQDRERPLLLGSLKSNVGHTQAAAGVSGVIKMVMALRHGVVPRTLHVDEPSRHVDWTAGAVHLVTENQPWPDTDRPRRAGVSSFGVSGTNAHVIIEGSPTSSPVAEPSGDVLPLVVSAKTPQALTAYEDRLRAFLAAAPVTDTRAVASTLAVTRSLFEHRAVLVGDNTVTGTALAEPRVVFVFPGQGWQWLGMGAALMESVVFAERMAECAAALGEFVDWDLLAVLDDSAVVDRVDVVQPACWAVMVSLAAVWQDAGVRPDAVIGHSQGEIAAACVAGAISLRDAARIVALRSRLISERLGKGAMASITLPADQITLAEGAWIAAYNGPASTVVAGTPDAIEQMQGDRVRRIAVDYASHTPHVEQIRAELLDLTAEVGSRTPTVPWYSTVDGTWIDSPLDGEYWYRNLRQPVGFHPAVQTLQALGETVFVEVSASPVLLPAMDDAVTVATLRRDEGTLTRMHTALAESHVLGVSIDWPHVLGDTGERMLDLPTYAFERHRYWSTARRNPSIAPDDLLTVVRDSAAVVLGYADGGAVPVTGAFKDLGIDSLTAVELRNGLAKATGLRLPATVAFDYPTPQALAARL

SEQ ID NO: 13 - protein, 865 aa, Micromonospora A92-306401
EPLAIVGMACRLPGGVSSPEDLWRLVESGTDAITGFPADRGWAEYSFQGGFLDDAADFDAAFFGISPREALAMDPQQRLVLETAWEAFERAGIEPGSLRGSDTGVFMGAYPGGYGIGADRAGFGATAGAGSVLSGRVSYFFGLEGPAVTVDTACSSSLVALHQAGHALRLGECSLALVGGVTVMATPDTFVEFSRQGGLAADGRSKAFADSADGAGFAEGAGVLLVERLSDAQRHGHQVLALVRGSAVNQDGASNGLTAPNGPSQQRVIQAALDNAGLTAAEVDVVEAHGTGTTLGDPIEAQAVIAAYGQGRGEPLLLGSIKSNVGHTQAAAGVSGVIKVVMALRHGVVPRTLHVDEPSRHVDWTAGAVRLATENQSWPETGRPRRAGVSSFGISGTNAHVILEGVPEEPAGHEEPAGLTPLLISAKTPAALAEFEDRLRAYLTTEPSLPAVASTLARTRSLFDHRAVVLDGDVVRGVAEPDRRVVFVFSGQGSQRAGMGDDLAAAFPVFAKIRQQVWDQLDIPDLPVDQTGYAQPALFALQVALFGLLDSWGVRPDALVGHSIGELAAGYVAGIWSLEDACALVSARARLMQALPPGGVMVAVPVSEQQARGALTDGVEIAAVNGPASVVLSGDEAAVLRAAAALGGRSKRLATSHAFHSARMEPMLDEFRMVAERLSYGSPRISMAVGDGPDYWVRQVREAVRFGEQVAAHDGAVFVELGPDGSLARLIDGIAMLDRDDEPRAALTALARLHVQGVKVDWPIGAGRRVDLPTYPFQRQRYWIDRPTARRAPTDLLTLVRDTAATVLGYPDSSAVPATTAFKDLGVDSLTAIELRNGMATTTGLRLPATLVFDYPTPAALAARL

SEQ ID NO: 14 - protein, 898 aa, Micromonospora A92-306401
EPLAIVGMACRLPGGVSSPEDLWRLVESGTDAISGFPTDRGWAEHSFQGGFLDGAGDFDAPFFGISPREARVMDPQQRLVLEASWEAFERAGIEPGTVRGSDTGVFMGAYSGGYAAGADLAGFAATAGAGSVLSGRVSYFFGLEGPAVTVDTACSSSLVALHQAGHALRQGECSLALVGGVTVMATPDLFVEFARQQGLAADGRCKAFADNADGTGWSEGVGVLLVERLSDAERNGHRVLAVVRSSAVNQDGASNGLTAPNGPSQQRVIQAALDNAGLTPADIDVVEAHGTGTTLGDPIEAQAVIATYGQTREQPLLLGSLKSNVGHTQAAAGVSGVIKMVMALRHGVVPRTLHVDEPSRHVDWTAGAVQLAVENQPWPNTGRPRRAGVSAFGVSGTNAHVIIEGSPTPSPVAEPSGDVLPLVISAKTPQALTAYEDRLRTYLNATPEIDTRAVASTLAVTRSLFEHRAVLLGDNTVSGTALTEPRVVFVFPGQGWQWLGMGAALMESVVFAERMAECAAALSEFVDWNLITVLNDPAVVDQVDVVQPACWAVMVSLAAVWQDAGVRPAAVIGHSQGEIAAACVAGAISLRDAARIVALRSRLIGERLGRGAMASVALPADEIALVDEVWVAAYNGPASTVIAGAPDAIEQMLGDRVRRIAVDYASHTPQVEQIRAELLDLTAEVSSQAPTVPWYSTVDGTWIDGPLDSDYWYRNLRQPVGFHPAVEALGGLGETVFVEVSASPVLLPAMDDAVTVATLRRDEGTLTRMHTALAEAHVLGVTIDWPAVVGDTGERMLDLPTYAFQHHRYWTTATARLEGRTGAEKHRLLLDIVLANAATVLGHDTADTIASDKPFKDLGIDSLTAVELRNSLARATELRLPATTAFDYPTPEALATRL

SEQ ID NO: 15 - protein, 867 aa, Micromonospora A92-306401
EPLAIVGMACRLPGGVSSPEDLWRLVESGTDAITGFPADRGWPDDSRQGGFLDDAADFDAAFFGISPREALAMDPQQRLVLEAAWEAFERAGIEPGSLRGSDTGVFMGAYPGGYGIGADQAGFGTTAGAGSVLSGRVSYLFGLEGPAVTVDTACSSSLVALHQAGHALRLGECSLALVGGVTVMGTPDIFAEFSRQGGLASDGRCKPFADAADGTGWAEGVGVLLVERLSDAERHGHQVLAVVRGSAVNQDGASNGLTAPNGPSQQRVIQSALIQAGLAPHEVDVVEAHGTGTTLGDPIEAQAVIAAYGQDRAQPLLLGSIKSNVGHTQAAAGVSGVIKMVMALRHGVVPRTLHVDEPSRHVDWSAGAVRLATESQPWPDTGHPRRAGVSSFGISGTNAHVILEGVPEEPADTGEPSGLVPLLLSAKTPAALTHLEDRLRAYLTTEPNLPAVASTLAQTRSLFDHRAVLLDGDVVRGVAEPDRRVVFVFSGQGSQRAGMGDDLAAAFPVFAKIRQQVWDLLDIPDLPVDETGHAQPALFALQVALFGLLDSWGVRPDALVGHSIGELAAGYVAGIWSLEDACALVSARARLMQALPPGGVMVAVSVSEEQARAVLTDGVEIAAVNGPASVVLSGEETAVLQAAAALGGRSKRLATSHAFHSARMEPMLDEFRMVAERLSYGSPQIPMAVGDGPDYWVRQVRETVRFGEQVAAHDGGIFVELGPDGSLARLVDGIAVLDRDDEPRAALTALARLHVQGVKVDWPIAAGRRVLDLPTYPFQHQRYWATRPAARRAPTDLLTLVRDTAATVLGYPDSSAVPATTAFKDLGVDSLTAVELRNNLATSTGLRLPATLVFDYPTPATLAARLD

SEQ ID NO: 16 - protein, 868 aa, Micromonospora A92-306401
EPLAIVGMACRLPGGVSTPEDLWQLVESGTDAISGFPADRGWDDYPYQGGFLTTAADFDAAFFGISPREALAMDPQQRLILEASWEAFERAGINPADARGSDTGVFMGAFSAGYGDDRDDSPATAGAVSVLSGRVSYFFGLEGPAMTVDTACSSSLVALHQAGYSLRHGECSMALVGGVTVMATPRTFVEFARQGGLAEDGRCKAFADTADGTGWAEGVGVLLVERLSDAERNGHRVLAVVRSSAVNQDGASNGLTAPNGPSQQRVIQAALDNAGLAPQDVDVVEAHGTGTTLGDPIEAQAVIATYGQNRQQPLLLGSIKSNVGHTQAAAGVSGIIKMIMALRHGVVPRTLHVDEPSRHVDWTAGAVRLVTENQPWPDADRPRRAGVSSFGISGTNAHIILEGVPEEPAQPDESPELTPLVISAKTAPALTQFEARLRSYLTTEPALSAVASTLAQTRSLFDHRAVLLGGDTITGVAEPSPRVVFVFSGQGSQRAGMGDELAAAFPVFAKIRQQVWDLLDIPDLPVDETGHAQPALFALQVALFGLLDSWGVRPDALIGHSIGELAAGYVSGIWSLEDACALVSARARLMQASPPGGAMVAVPVSEQQARAVLTDGVELAAVNGPSSVVLSGDETAVLQAAAALGGRSKRLATSHAFHSARMEPMLDEFRAVAEQLSYRSPQIPMAVGDGPEYWVRQVRDTVRFGEQVAAHDGAIFVELGPDGSLVRLIDGIPMLDRDDEPRAALTALARLHVRGVNVAWPIAADRRELDLPTYPFQRERYWSTASLSALAPAEREQALRKVVSDSSAMVLGYAEGRAVAPTAAFKDLGVDSLTAVELRNSLTKATGLRLPATIVFDYPTPGALAVRL

SEQ ID NO: 17 - protein, 882 aa, Micromonospora A92-306401
EPLAIVGMACRLPGGVSSPEDLWRLVESGTDAISRFPADRGWDVDGLYDPDPDAPGKSYSVEGGFLDAVADFDAAFFGISPREALAMDPQQRLILEASWEAFERAGIEPGSLRGSDTGVFMGAYSSGYGIGADIPGLGVTAGAVSVVSGRVSYFFGLEGPAVTVDTACSSSLVALHQAGHALRRRECSLALVGGVTVMATPFGFVEFSRQRGLASDGRCKAFADTADGTSWSEGAGVLVVERLSDAERHGHQVLAVVRGSAVNQDGASNGLTAPNGPSQQRVIQAALANAGLTPHEVDVVEAHGTGTRLGDPIEAQAVIATYGQARGEPLLLGSIKSNVGHTQAAAGVSGVIKMVMALRHGVVPRTLHVDEPTRHVDWTTGAVRLATENQPWPETERPRRAGVSSFGVSGTNAHIILEGVAAEPAQPGESPELTPLLLSAKTPAALTHLEDRLRAYLTTEPNLPAVASTLAQTRSLFDHRAVLLGGETVTGVAEPDPRVVFVFSGQGSQRAGMGDDLAAAFPAFAKIRQQVWDQLDIPNLPVDETGHAQPALFALQVALFGLLDSWGVRPDALVGHSIGELAAGYVAGIWSLEDACALVSARARLMQALPPGGVMVAVSVSEEQARAVLTDGVEIAAVNGPASVVLSGEETAVLQAAAALGGRSKRLATSHAFHSARMEPMLDEFRAVAEQLSYGSPRIPMAVGDGPDYWVRQVRDTVRFGEQVAAHDGAIFVELGPDGSLARLIDGIAVLDRDDEPRAALTALARLHVRGVKVDWPIAAGRRELDLPTYPFQHQRYWIDSRPTARRAPTDLLTLVRDTTATVLGYPDNTAVTPTTAFTDLGIDSLTAIELRNNMATTTGLRLPATLVFDYPTPATLAARLD

SEQ ID NO: 18 - protein, 897 aa, Micromonospora A92-306401
EPLAIIGMACRLPGGVTTPEDLWQLVETGTDAISALPTDRGWADHPYQGGFLTTAADFDAAFFGISPREALAMDPQQRLILETSWEAFERAGINPADAHGSDTGVFMGAYSGGYGIGADLAGFGATAGATSVLSGRVSYFFGLEGPAITVDTACSSSLVALHQAGHALRHGECSLALVGGVTVMATPDIFVEFARQRGLAADGRCKAFADTADGTGWAEGVGVLLVERLSDAERNGHRVLAVVRSSAVNQDGASNGLTAPNGPSQQRVIQAALDNAGLTPADIDVVEAHGTGTTLGDPIEAQALIATYGQNREQPLLLGSLKSNIGHTQAAAGVSGVIKMVMALQHGVVPRTLHVDKPSRHVDWTAGAVRLLTESQPWPDTDRPRRAGVSSFGVSGTNAHVIIEGSPTPSPVADPSGDVLPLVISAKTPAALAAYEDRLRTYLNATPEIDTRAVASTLAVTRSLFEHRAVLLGEDTVSGTALTEPRVVFVFPGQGWQWLGMGAALMESVVFAERMTECATALSEFVDWNLITVLNDPAVIDQVDVVQPACWAVMVSLAAVWQAAGVRPDAVIGHSQGEIAAACVAGAISLRDAARIVALRSRLISERLGKGAMASITLPADQITLAEGAWIAAYNGPTSTVVAGTPQAIEQMHGERVRRIAVDYASHTPHVEQIRAELLDLTTDVSSQTPTLPWYSTVDGTWIDSPLDGDYWYRNLRQPVGFHPAVQTLQALGETVFVEVSASPVLLPAMDDAVTIATLRRDEGTLTRMHTALAEAHVLGVTIDWPHVLGDTGERMLDLPTYAFQHHRYWTTAARLTGRTTAAQHRLMLDFVLGNVAAVLGHGSAGDVAPDKPFKELGMDSLTSVELRNSLAKATGQRLPATIVFDHPTADALATYL

SEQ ID NO: 19 - protein, 945 aa, Micromonospora A92-306401
EPIAIVSMACRVPGGVTSPEGLWRLVESGTDAISEFPGDRGWDVANLYSPDPDAPGKSYSLQGGFLDGAAAFDASFFGISPREALGMDPQQRLLLETSWEAVERARIDPKSLRGRDVGVYVGGAAQGYGLGAAEAQRDNLITGGSISLLSGRLSYALGLEGPGLTVDTACSSSLVALHLAAQALRQGECSLALVSGVSVMPTPDVFVEFSRQRGLAADGRCKSFAAAADGTSWSEGVGVLLLERLSDARRLGHEILAVVRGTAVNSDGASNGLTAPNGASQQRVIRQALASAGLGPADVDAVEAHGTGTKLGDPIEAEAILATYGKDRPTPVWLGSLKSNIGHTMAASGVLGVIKMVESMRHGVLPRTLHVDEPSPHVDWAAGDVALLTSNQPWPAGRKPRRAGVSSFGLSGTNAHVVLEQYRMPAAPVTTKEAGPLPWVLSAQTPEALRERAGQLATALAGDPAWHPLDVGYSLAATRSTFAHRAVVVGGDREFVRTLGKLADGAGWPGLTTGVAKSRRIAFMFDGQGTQRLAMGQGLYARFPAFTRTWDTVSAEFAKHLDHTLTDVYLGGGGTAAAELVDDPLYAQAGIFAVEVALVELLAEWGVRPDVVTGHSIGEAAAAYTAGMFSLADVTALITARGAALRSAPPGAMLALRAGEPEVRDFLDRTGAALDVAAVNGPAAVVVSGAPDAVAGFASAWTASGRECRQLKVRRAFHSRHVEGVLGDFRTVLKSLTFRTPALPIVSTVTGRLIDPAEMGTPEYWLSQVRQPVRFQDAVGELAGQGVSAFLEVGPSGTLASAGMECLDASFHALLRPRPAEDIGVLTALAELYAGGTAVDWATVLAGGRPVDLPVYPFQHQSYWLRSAPDEPRTVLEMVHLEVASILGITDPDAVQDDSSFLELGFDSLSGVRLRNRLTQVTGLTLPATLLFDHDTPSALATELD

SEQ ID NO: 20 - protein, 907 aa, Streptomyces kanamyceticus
EPLAVVGMACRLPGGITSPEELWELVEDGGDAVGDFPTDRGWDVAALHAAAESATSRAGALMGAADFDAAFFGISPREATALDPQQRILLEIAWEAIERAGIKADVLRGTDTGVFVGGFYYGYGAGADLGGFGAYSTQPAVLAGRLSYFFGLEGPAVTVDTACSSSLVALHQAGQALRAGECSLALVGGVTVMASPQSFVEFSRQGGVAPDGRCKAFADAADGTGFAEGAGVLVVERLSDAERNGHTVLAVVRGSAVNQDGASNGISAPNGPAQQRVIRQALGSAGLAPADVDVVEAHGTGTVLGDPIEAQAVLATYGQGREVPLLLGSLKSNIGHAQAAAGVAGVIKMVMAMRRGVVPRTLHVDEPSSHVDWTTGAVELLTEARPWPESDRPRRAGVSAFGVSGTNAHVILEEVAESSVRSGGSSGLVPLPVSARTESSLAVQVERLGAYVRSGADLSAVADGLVRERVVFGHRAVLLGESTVAGVAEGELRTVFVFPGQGSQWVGMGRELMGASEVFAARMRECAAALEPHTGWDLLDVLGEAVVADRVEVLQPASWAVAVSLAALWQAHGGTPDAVIGHSQGEIAAASVAGALSLEDAARIVALRSQTIAARLGRGAMASIAIPSAEVEVMEGVWVAARNGPSSTVIAGDPAAVEQVLARYEAEGVRVRRIAVDYASHTPHVEAIQDELAEVLEGVTAQVPTIPWWSTVDSDWVTEPVDDDYWYRNLRQPVAMDTAIGELDGSLFIECSAHPVLLPALDQERTVASLRTDDGGWERFLTALAEAWTQGADVDWTILVEPAPHRLDLPTYPFDHKRYWLLERLGAMTGADRDAALLTLVRDCAAAVLGHVDAAGVPADAAFKDLGVDSLTAVELRNRLAAATGVRLPATLAFDHPTPRAIASRLD

SEQ ID NO: 21 - protein, 905 aa, Streptomyces kanamyceticus
EPLAIVGMACRLPGGVASPGDLWQMLDSGGDAVTGFPVDRGWDPSGLTGGPDADRGGFLSDAADFDAAFFGISPREALAMDPQQRILLETTWEAFENAGIVPGTLRGSDTGVFMGAFSYGYGVGADLGGFGSIGVQPSVLTGRISYFYGLQGPAFTVDTACSSSLVALHQAGHALRHGECSLALVGGVTVMANPDGFVEFEQQGGLSPDGRCRAFADAANGTGWAEGAGVLVVERLSDAERNGHTVLAVVRGSAVNQDGASNGLSAPNGPSQQRVIRQALANAGLGAADVDVVEAHGTGTVLGDPIEAQAVLATYGQGREVPLLLGSLKSNIGHAQAAAGVAGVIKMVMAMRRGVVPRTLHVDEPSSHVDWTAGAVEVVTEARPWPESGRVPRAGVSSFGVSGTNAHVVLEGAPEPSSGAEASSGGGLVPLPVSARTESSLAVQVERLGAYVRGGADLGAVADGLVRGRAVFDRRAVLLGESTVAGVAVEGARTVFVFPGQGSQWVGMGRELMGVSEVFAARMRECAAALEPYTGWDVLDVLGEAVVADRVEVLQPASWAVAVSLAALWQAHGVVPDAVVGHSQGEIAAACVAGALSLEDAARVVALRSQTIAARLGHGAMASIALPASAVEVMEGVWIAARNGPESTVVAGDPAAVERVLARYEAAGVRVRRIAVDYASHTPHVEAIQDELADVLGGITSSAPDISWWSTVDSGWVTEAVGDDYWYRNLRQPVAMDTAVSELDGSLFIECSAHPVLLPALDQERTVASLRTDDGGWDRFLTALAQAWTQGADVDWTTLIEPAQHRLDLPTYPFDHKRYWLQPAGARNEVARHTDLLTLVRQKAAALLGHAGPEDVPEDAAFRQLGVDSLIAVQLRNGLNEATGLRLSATLVFDYPTPRALAGRI

SEQ ID NO: 22 - protein, 913 aa, Streptomyces kanamyceticus
EPVAIVGMACRLPGGVTSPEDLWRLVASGTDAITEFPADRGWDVDALFDPDPDAVGRSTTRHGGFLTEATGFDAAFFGISPNEALAMDPQQRLVLETSWEAFEHAGIVPDTLRESDTGVFMGAFHQGYGAGRDLGGLGVTATQTSVLSGRLSYFYGLQGPAVTVDTACSSSLVALHQAAQALRSGECSLALAGGVTVMATPGSFVEFSRQRGLSPDGRCKAFADSADGTGFAEGVGVLVVERLSDAERNGHTVLAVVRGSAVNQDGASNGLSAPNGVAQQRVIRQALANAGLNGTDVDAVEAHGTGTVLGDPIEAQAVLATYGQEREVPLLLGSVKSNVGHTQAAAGVAGVIKMVMAMRRGVVPRTLHVDESSSHVDWSAGAVEVVTEARPWPESGGARRAGVSSFGVSGTNAHVILEGVAESSVRSGGSSAGLVPLPVSARTESSLALQVERLGEYVRGGADLGAVADGLVRGRAVFGRRAVLLGESTVAGVAVEGARTVFVFPGQGSQWVGMGRELMGVSEVFAARMRECAAALEPHTGWDVLDVLGEAVVADRVEVLQPASWAVAVSLAALWQAHGVVPDAVVGHSQGEIAAACVAGALSLEDAARVVALRSQTIAARLGHGAMASIALPASAVEVMEGVWIAARNGPESTVVAGDPAAVERVLARYEAAGVRVRRIAVDYASHTPHVEAIQDELADVLGGITSSAPSVPWWSTVDSGWVTEPVDDDYWYRNLRQPVAMDTATGELDGSLFIECSAHPVLLPALDQERTVASLRTDDGGWERFLTALAEAWTQGADVDWTTLIEPAQHRVDLPTYPFDHKRYWLQPARRTVRTGEDSGRDLLAVVCGATAAVLGHADASEIGPATAFKDLGIDSLSGIRLRNSLAETTGVRLSATAVFDHPTPDALAARL

SEQ ID NO: 23 - protein, 928 aa, Streptomyces kanamyceticus
EPLAIVAMACRMPGGVDTPEDLWRLVESGGDAITEFPTDRGWDLAALYDPDPDAIGKVSVRHGGFLAGAADFDAEFFGISPREALAMDPQQRLILEVSWEAFERAGILPASVRGSDAGVFMGAFTQGYGAGVDLGGFGATGTPTSVLSGRLSYYFGLEGPSVTVDTACSSSLVALHQAARSLRSGECSLALVGGVTVMATTTGFVEFSRQRGLAPDGRAKAFADTADGTSFAEGAGVLIVERLSDATRLGHPVLAVVRGSAVNSDGASNGLSAPNGPAQRRVIERALDDAGLVPGDIDAVEAHGTGTRLGDPIEAQALEAAYGLDRVHPLLIGSLKSNLGHTQAAAGVAGVIKMVLAMRHGVLPRTLHVDEPSRHVDWGGGVRLLRRNEPWPVTGRVRRAGVSSFGISGANAHVVIEAGPPAAPATLPATEPVPEGVVWPVSARTPDGVRDVAGRLVALTAPAAAIGHSLATTRTAMRHRAVVPARDAEAFARGEEVPGVVRGTADVTDARAVFVFPGQGSQWDGMGAELLATEPVFARRLGECAEALAPYTGWDLLDVIARRPGAPALDRVDVVQPVSFAMMVALAELWRSRGVAPAAVVGHSQGEVAAACVAGVLTLDDAAKVVALRSRLVATELGHGGMVSVPPADFDAAAWAGRLEVAAVNGPASIVVAGAADAVEELLAATPHARRIAVDYASHTAHVETIRDALLDALADLTPGAPEVPFFSTVDEAWLDRPADAAYWYDNVRRPVRFGAATARLAELGYRVFVEASPHPVLTTALADTLAGHPNTAVTGTLRRGDGGARRFTSSLAELWVRGVPVSWPSGESRRVPLPTYPFRRDRYWIDAEAAPTAARDMLELVRTSAALVLGHRDAHAIEPTRAFKEVGFDSLTGVELRNRLADATGLTLPATLVFDHPTAQALAAHLD

SEQ ID NO: 24 - protein, 893 aa, Streptomyces kanamyceticus
EPLAIVGMACRLPGGVASPEDLWRLLESGGDGITTFPGDRGWDVEALYDPDPEHPGTSTVRHGGFLSGAGDFDAGFFGISPREAVAMDPQQRVVMETSWEALEYAGIDPHTLRGSDTGVFMGGYFYGYGSGADRGGFGATSTQTSVLSGRLSYFYGLEGPAVTVDTACSSSLVALHQAGQSLRTGECSLALVGGVTVMASPSGFVDFSQQRGLAPDGRCKAFAEAADGTGFAEGSGVLVVERLSDAERHGHRVLAVVRGSAVNQDGASNGLSAPNGPSQERVIRQALANAGLQPSDVDAVEAHGTGTRLGDPIEATALLATYGQDRATPLLLGSLKSNIGHTQAAAGVAGIIKMVLAMHHDTLPSTLHVDTPSSHVDWTAGTVELLTDARPWPETSRPHRAAVSSFGVSGTNAHVILESHPRPTPAPDTGSSTHPVPLLISARTPRALSEHTTRVSAFLDAGGGDERAVASALLTRTAFTHRAALIGTDLITGTAVPDRRLVWLFSGQGSQRPGMGDELAAAYDVFARTRRDVLDALQVPAGLDIHDTGYAQPAVFALQVALSAQLDAWGVRPDALVGHSIGELAAAYVAGVWSLDDACALVSARARLMQALPPGGAMAAVIASERDALPLLREGVEIAAVNGPASIVLSGDEDAVLDVAARLGRFTRLRTSHAFHSARMEPMLDEFRDVAQRLTYHEPKLPMAAGADCATPEYWVRQVRDTVRFGEQVAAYDGAALLEIGPDRNLARLVDGIPVLHGDDEARSAMTALARLHTGGVAVDWPEVIGAAPTHLNLPTYPFERTRYWLGSRDRIAGLTAADAEKAALAVVRECAAAVLGHEGPARIEATATFKELGVDSLTAVRLRNAFTEATGVRLPATAVFDFPTPQAVAAKL

SEQ ID NO: 25 - protein, 930 aa, Streptomyces kanamyceticus
EPLAIVGMACRLPGGVASPEDLWRLLESGGDGITAFPADRGWDVEALYDPDPEHPGTSTVRHGGFLSGAGDFDAGFFGISPREAIAMDPQQRVVLETSWEALEQAGIVPGTLRGSDTGVFMGAFSDGYGLGTDLGGFGATGTQTSVLSGRLSYFYGLEGPAVTVDTACSSSLVALHQAGQSLRTGECSLALVGGVTVMASPGGFVEFSQQRGLAPDGRCKAFAEAADGTAFAEGSGVLVVERLSDAERRGHRILAVVRGSAVNQDGASNGLSAPNGPSQERVIRQALANAGLRPSDVDAVEAHGTGTRLGDPIEATALLATYGQDRATPLLLGSLKSNIGHTQAAAGVAGIIKMVLAMRHGSLPRTLYVDTPSSHVDWTAGGVELLTDARPWPATTGPRRAAVSSFGVSGTNAHVILEAHAAPEPPALDSPVVEPSASLFATELTPLPVSARTSEAVDGQVQRLREHLATHPGDDPRAVAAALLATRTDFPHRAVLLGDGVVTGTALTAPRTVFVFPGQGSQWLGMGRKLMAESPVFAARMRQCADALAEHTGRDLIAMLDDPAVKSRVDVVHPVCWAVMVSLAAVWEAAGVRPDAVIGHSQGEIAAACVAGAISLEDGARLVALRSALLVELAGRGAMGSIAFAAADVEAAAARIDGVWVAGRNGTATTIVSGRPDAVETLIADYETRGVWVTRLVVDCPTHTPFVDPLYDELQRIVAATTSRAPEIPWFSTADERWIDAPLDDEYWFRNMRNPVGFAAAVAAAREPGDTVFIEVSAHPVLLPAINGTTVGTLRRGGGADRLLDSLAKAHTVGVAVDWAAHDAATGTADLPTYAFHHERYWIEPAERLPDLSRKEQEQVLLDVVRDTAATLLGHADARAVTATAAFKDLGVDSLTALGLRDRLAEALGIPLPATLVFDHPAAGTLSRHL

SEQ ID NO: 26 - protein, 870 aa, Streptomyces kanamyceticus
EPLAIVGMACRLPGGVASPDDLWRLLESGGDGIGAFPGDRGWETGADGRGGFLSGAAGFDAAFFGVSPREALAMDPQQRVVLETSWEALEHAGIDPHTLNGSDTGVFLGAFFQGYGIGADFDGYGTTSIHTSVLSGRLSYFYGLEGPAVTVDTACSSSLVALHQAGQSLRTGECSLALVGGVTVMASPAGFADFSEQGGLAPDGRCKAFAEAADGTAFSEGSGVLVVERLSDAERHGHRILAVVRGSAVNQDGASNGLSAPNGPSQERVIRQALANAGLQPSDVDAVEAHGTGTRLGDPIEATALLATYGQHRTTPLLLGSLKSNIGHTQAAAGVAGIIKMVLAMHHDTLPPTLHVDTPSSHVDWTTGGVELLTDARPWPTTTGPRRAGISSFGVSGTNAHVILESPTPVPSPGAEPGARPVPLPISARTPEALDEHTIRIRAFLDDNPGADHVAVAQTLARRTPFEHRAVLLGDTLITADPNAGSGPVVFVYSGQSTLHPHTGRQLAATYPVFADAWGEVLGHLDADQGPATHFAHQIALTALLRSWGIAPHAVIGHSLGEISAACAAGVLSLGDASALLAARSRLMDELPAGGAMVTVLTSEENALRALRPGVEIAAVNGPHSVVLSGDEGPVLAVAQQLGIHHRLPTRHAGHSARMDPLVAPLLEAASGLTYHQPRIAIPGDPTTAAYWARQVRDQVRFQAHAERYPGATFLEIGPNQDLSPVVDGIPTQTGTPDEVQALHTALARLHTRGGVVDWPTVLGGDRAPVALPTYPFQHKDYWLRATELAVLPDDERADALLAFVRNSTATVLGHLGAEDIPATATFKELGIDSLTAVQLRNALTTATGVRLNATAVFDFPTPRALAARL

SEQ ID NO: 27 - protein, 898 aa, Streptomyces avermitilis
EPLAIVGMACRLPGGVASPEGLWRLVASGTDAITEFPADRGWDVDALYDPDPAIGKTFVRHGGFLDGATGFDAGFFGISPREALAMDPQQRVLLETSWEAFESAGITPDSARGSDTGVFIGAFSYGYGTGADTNGFGATGSQTSVLSGRLSYFYGLEGPSVTVDTACSSSLVALHQAGQSLRSGECSLALVGGVTVMASPGGFVEFSRQRGLAPDGRAKAFGAGADGTSFAEGAGALVVERLSDAERHGHTVLAVVRGSAVNSDGASNGLSAPNGPSQERVIRQALANAKLTPADVDAVEAHGTGTRLGDPIEAQALLATYGQDRATPLLLGSLKSNIGHAQAASGVAGIIKMVQAIRHGELPPTLHADEPSPHVDWTAGAVELLTSARPWPGTGRPRRAAVSSFGVSGTNAHIILEAGPVKAGPVEAGPVPAAPPSAPGEDLPLLVSARSPEALDEQIGRLRTYLDTRPGVDRAAVAQTLARRTHFAHRAVLLGDTVITTSPSHQADELVFVYSGQGTQHPAMGEQLAAAFPVFAETWHDALRRLDDPDPHDPTRSQHTLFAHQAALTALLRSWDITPHAVIGHSLGEITAAYAAGILSLDDACTLITTRARLMHTLPPPGAMVTVLTGEEEARQALRPGVEIAAVNGAHSVVLSGDEDAVLDVAQRLGIHHRLPAPHAGHSAHMEPVAAELLATTRRLRYDRPHTAIPNDPTTAEYWAEQVRNPVLFHAHTQQYPDAVFVEIGPGQDLSPLVDGIALQNGPANEAHALRTALARLFSRGATLDWPLVLGGASRHDPDVPSYAFQQRPYWIESARLAELPDADRDTALSTLVMDATAAVLGHADASEIGPTTTFKDLGIDSLTAIELRNRLAEATGLRLSATMVFDHPTPRVLAAKL

SEQ ID NO: 28 - protein, 913 aa, Streptomyces kanamyceticus
EPLAIVGMACRLPGGVTSPEDLWRLVASGTDAITEFPTDRGWDIDRMFDPDPDAPGKTYVRHGGFLSEAAGFDAAFFGISPREAWAMDPQQRVILETVWEAFENAGIVPDTLRGSDTGVFMGAFSHGYGAGVDLGGFGATATQNSVLSGRLSYFFGMEGPAVTIDTACSSSMVALHQAAQSLRDGECSLALAGGVTVMPTPLGYVEFCRQRGLAPNGRAKAFAEGADGTSFSEGAGVLVVERLSDAERNGHTVLALVRSSAVNQDGASNGISAPNGPSQQRVIRQALDKAGLTPADVDVVEAHGTGTPLGDPIEAQAIIATYGQDRDTPLYLGSVKSNIGHTQTTAGLAGVIKMVMAMRHGLLPKTLHVDEPSSHVDWSAGAVELLTEARPWPDSDRPRRAGVSSLGISGTNAHVILEGVAESSVRSGGSSGLVPLPVSARTESSLALQVERVGEYVRGGADLGAVADGLVRGRAVFDRRAVLLGESTVAGVAVEGARTVFVFPGQGSQWVGMGRELMGASEVFAARMRECAAALEPHTGWDVLDVLGEAVVADRVEVLQPASWAVAVSLAALWQAHGVVPDAVIGHSQGEIAAACVAGALSLEDAARVVALRSQTIAARLGHGAMASIALPASAVEVAEGVWIAARNGPESTVVAGDPGAVERVLARYEAAGVRVRRIAVDYASHTPHVEAIEEQLADVLGGITSSAPDISWWSTVDSGWVTEPVGDDYWYRNLRQPVAMDTAISELDGSLFIECSAHPVLLPALDQEHTVASLRTDDGDWDRFLTALAQAWTQGAPVDWTTLIEPAPHRLDLPTYPFDHKRYWIEAAARLAGHTAAEQRRVMQEVVLRQAAAVLAYGLGEQVAADRPFRDLGFDSLTAVDLRNRLAAETGLRLPTTVVFSHPTAEALATHL

SEQ ID NO: 29 - protein, 936 aa, Streptomyces kanamyceticus
EPIAIVAMACRLPGGVTSPEELWRLVESGTDAITMAPGDRGWDLDALYDPDPDAVGKAYNLRGGFLEGAAEFDAAFFDISPRESLGMDPQQRLLLETAWEAIERGRINPASLHGREIGVYVGAAAQGYGLGAEDTEGNAITGGSTSLLSGRLAYVLGLEGPSVTVDTACSSSLVALHLACQGLRLGECELALAGGVSVLSSPAAFVEFSRQRGLAADGRCKSFGSGADGTTWAEGVGVLVLERLSDAERLGHTVLAVVRGSAVTSDGASNGLTAPNGLAQQRVIRKALAAAGLTAADVDLVEGHGTGTRLGDPVEADALLATYGQNRQEPVWLGSLKSNIGHATAAAGVAGVIKTVQAIGAGTMPRTLHADEPSPAVDWTAGRVSLLTGNRPWPDDERARRAAVSAFGLSGTNAHVILEQHRPEPVAPRPPREEPRPLPWVLSARTPAALRAQAARLRDHLAAVPDADPLDIGYALATSRARFTHRAAVVATSSDEFRAGLDSVADGVEAPGVVGGTARERRVAFLFDGQGAQRVGMGRELHGRFPVFAAAWDEVSDAFGKHLEHSPTDVFHGEHGDLAHDTLYAQVGLFTLEVALLRLLEHWGVRPDVLVGHSVGEVTAAYAAGVLTLADATALIVARGRALRALPPGAMTAVDGSPAEVGAFTGLDIAAVNGPSAVVLTGSPDDVTAFEREWAAAGRRAKRLDVGHAFHSRHVDGALDDFRTVLESLSFGAARLPVVSTTTGRDAAGDLATPEHWLRHARRPVLFADAVRELADLGVNMFVAVGPSGALASAASENTGGSAGTYHAVLRARTGEENAALTAVAELHAHGAPVDLAAVLAGGRPVDLPVYPFQHRSYWLAPDDLTVAEIVRRRAAALLGIADPGDVDADTTFFALGFDSLAVQRLRNQLTAATGLDLPTAVLFDHDTPSALTAYL

SEQ ID NO: 30 - protein, 901 aa, Streptomyces violaceusniger
EPLAIVGMACRLPGGVSSPEDLWRLVESGTDAISGFPTDRGWDVENLYDPDPDASGKSYCVQGGFLDAAAGFDAGFFGISPREALAMDPQQRLVLEVSWEAFERAGIEPGSVRGTDTGVFIGAYPGGYGAGAGTELEGYGTTSGPSVLSGRVSYFFGLEGPAITVDTACSSSLVALHQAGYALRQGECSLALVGGVTVMATPDVFTEFARQRGLAADGRSKAFSDSADGAGFSEGIGVLLVERLSDAQAKGHQVLAVVRSSAVNQDGASNGLTAPNGPSQQRVIQAALGNAGLTTAEVDVVEGHGTGTTLGDPIEAQALLATYGQDRERPLLLGSLKSNIGHTQAAAGVSGVIKMVMALRHGLVPRTLHVDEPSSHVDWTAGAVELVTANQPWPDADRPRRAGVSSFGVSGTNAHVILESAPSTQAVDDVRPVETPVVGSELVPLVLSAKTLPALSGYEDRLRAYLAGSPGVDLRAVASTLAVTRSVFEHRAVLLGDDTVTGTAVTDPRVVFIFPGQGSQRAGMGEELAAAFPVFARIHQQVWDLLDVPDLEVNETGYAQPALFALQVALFGLLESWGVGPDAVVGHSVGELAAAYVSGVWSLEDACTLVSARARLMQALPPGGVMVAVPVPEDEARAVLGEGVEIAAVNGPSSVVLSGDEAAVLRAAATLGKWMRLATSHAFHSARMEPMLDEFRAVAERLTYQTPHLTMAAGEQVTTPDYWVRQVRDVVRFGEQVASFEDAVFVELGADRSLARLVDGVAMLHGAHEAQAAISALAHLYVNGVTVDWPAVLGDVPGRVLDLPTYAFQHQRYWLEGWLAALTPAEREKALLKLVSDGAATVLGHADTSTIPVTGAFKDLGINSLTAVELRNSLAKATELRLPATLVFDYPTPATLAARLD

SEQ ID NO: 31 - protein, 890 aa, Streptomyces violaceusniger
EPLAIVGMACRLPGGVSSPEDLWRLVESGTDAISGFPTDRGWDVENLDSAGKSYRAEGGFLDAAAGFDASFFGISPREALAMDPQQRLVLEVSWEAFERAGIEPGSLRGSDTGVFMGAYPGGYGIGADLGGFGATAGATSVLSGRVSYFFGLEGPAFTVDTACSSSLVALHQAGYALRQGECSLALVGGVTVMATPQTFVEFSRQGGLASDGRCKAFADAADGTGWAEGVGVLLVERLSDAQAKGHQVLAVVRSSAVNQDGASNGLTAPNGPSQQRVIQAALSNAGLTTAEVDVVEAHGTGTTLGDPIEAQALLATYGQDRERPLLLGSVKSNLGHTQAAAGVSGVIKMVMALRHGLVPRTLHVDEPSRHVDWSTGAVELVTENQPWPETGRPRRAGVSSFGISGTNAHVILESAPSAQVVENTVVESAPEWVPLVVSARTQSALADYEDRLRAYLAGSPGVDLRAVASTLAVTRSVFEHRAVLVGDDTVTGSAVSDPRVVFVFPGQGSQRAGMGEELAAAFPLFAQIHQQVWDLLDVPDLEVNETGYAQPALFALQVALFGLLESWGVRPDAVIGHSVGELAAGYVCGVWSLEDACTMVSARARLMQALPAGGVMVAVPVSEDEARAVLGEGVEIAAVNGPLSVILSGDEAAVLRAAATLGKWTRLATSHAFHSARMEPMLEKFRAVAEGLTYRTPRLTMAAGDQVATAEYWVRQVRDVVRFGEQVASFEDAVFLELGADRSLARLVDGIAMLHGDHEAQAAISALAHLYVNGMAVDWPAVLGDVRGRVLDLPTYAFEHQRYWLEGWLAVLAPAEREKALLKLVRDSAALVLGHADASTIPVAAAFKDLGIDSLTAVELRNSLAKATGLRLPNTTVFDYPTPAILAARL

SEQ ID NO: 32 - protein, 928 aa, Streptomyces violaceusniger
EPLAIVGMACRLPGGVSSPEDLWRLVESGTDAISGFPTDRGWDAESLYDADPDAPGKSYCVEGGFLDNASSFDAGFFGISPREALAMDPQQRLVLEVSWEAFERAGIEPGSIRGTDTGVFMGAYAGGYGAGADLGGFAATASATSVLSGRVSYFFGLEGPAITVDTACSSSLVALHQAGYALRQGECSLALVGGATVMATPQSFVEFSRQRGLASDGRCKAFADAADGTGWAEGVGVLLVERLSDARRNGHQVLAVVRSSAVNQDGASNGLTAPNGPSQQRVIQAALSNAGLAAHEVDVVEAHGTGTTLGDPIEAQAVLATYGQDRERPLLLGSLKSNIGHTQAASGVSGVIKMVMALQHHTVPRTLHVNEPSRHVDWSAGAVELVRENQSWPEGDRPRRAGVSSFGVSGTNAHIILESAPAQSAEEVQPVEVPVVASDVLPLVVSAKTHSALTEAEDRLRAYLTASPEADMPAVASTLAVTRSVFEHRAVLLGDDTVTGTGTAMSDPRVVFVFPGQGWQWLGMGSALRESSVVFAERMAECAAALSDFVDWDLFTVLDDPAVVDRVDVVQPASWAVMVSLAAVWQAAGVRPDAVIGHSQGEIAAACIAGAVSLRDAARIVTLRSQAIARGPAGRGAMASIALPAQEIELADGAWIAAHNGPASTVIAGTPEAVDLVLTAHEAQGTRVRRITVDYASHTPHVELIRDELLHITAGIGSQVPVVPWLSTVDGTWVEGPLDAEYWYRNLREPVGFAPAISQLQAQGETVFIEVSASPVLLQAMDDDAVTVATLRRDDGDATRILTALAQAYTHGVTVDWPAILGTTTTRALDLPTYAFQHQRYWLNNRLTGRTSVEQHRVMLELVLGEAASVLGHGSPDAIATDTSFKDLGMDSLTAIELRNRLMAETGLQLPATMVFDYPTANALATHL

SEQ ID NO: 33 - protein, 962 aa, Streptomyces violaceusniger
EPIAIVAMACRVPGGVSSPEGLWRLVESGTDVISGFPTDRGWDVEGLFDPDPDAPGKSYCVQGGFLDTAADFDAPFFGISPREALGMDPQQRLLLETTWEAIERARIDPKSLRGRDVGVYVGGAAQGYGVGVDQQRDNGITGSSVSLLSGRVSYALGLEGPGVTVDTACSSSLVALHLASQALRQRECSLALVSGVSVMSSPAMFVEFSRQRGLSSDGRCKSFAASADGTIWSEGVGVLVVERLSDARRLGHRFLAVVRGSAVNSDGASNGLTAPNGASQQRVIRQALAGAGLTASDVDVVEAHGTGTKLGDPIEAEAILATYGQERSTPAWLGSLKSNIGHTMAASGVLGVIKMVEAMRHGSLPRTLHVDDPSPHVDWTSGSVALLTEHQPWPDDAKPRRAGVSSFGLSGTNAHVVLEQYQAPAPSVTPVTPVTPVTPVTPNEPRPLAWVLSAQSPKALREQAGRLYASLAEAPEWNSLDIGYSLATTRSDFAHRAVAVGSGREFLRALSKLADGASWPGLTTATAKARRVAFLFDGQGAQRLGMGKELYDSSPVFARAWDTVSAGFDKHLDHSLTDVYFGEGGSTTAELVDDTLYAQAGIFAMEVALFGLLEDWGVRPDFVAGHSIGEATAAYASGMLSLEHVTTLIVARGRALRATPPGAMVALRAGEEEVRAFLDQTGAALDLAAVNSPEAVVVAGEPDAVAGFEAAWAASGREARKLRVRHAFHSRHVEAVLDEFRTTLESLKFSAPALPVVSTVTGQLIEPDEMGTPEYWLRQVRQPVRFQDAVRELAEAGVGTFVEIGPSGALASAGMECLGGDASFHAVLRPRSPEDVCLMTAIAELYAGGTAIDWAKVLSGGRAVDLPVYPFQHQSYWLAPAEPSYADEPRTMLELVHMEVASVLGMTDPGVILDDSSFLELGFDSLSAVRLRNRLSKATGLDLPSTLLFEHPTSAELASHLD

SEQ ID NO: 34 - protein, 934 aa, Streptomyces violaceusniger
EPLAIVGMACRLPGGVSSPEDLWRLVESGTDAISGFPTDRGWDVEGLFDPDPDASGKSYCVRGGFLDSVGGFDASFFGISPREALAMDPQQRLLLEVSWEAFERAGIEPGSVRGSDTGVFMGGFPGGYGAGADLEGFGATAGAASVLSGRVSYFFGLEGPAITVDTACSSSLVALHQAGYALRQGECSLALVGGVTVMATPQSFVEFSRQRGLASDGRCKAFADAADGTGWAEGVGVLLVERLSDAQAKGHQVLGVVRGSAVNQDGASNGLSAPNGPSQQRVIRAALSNAGLTTAEVDVVEAHGTGTTLGDPIEAQAVLATYGQDREQPLLLGSLKSNIGHAQAAAGVSGVIKMVMALRHGLVPRTLHVDEPSRHVDWSAGAVELVTENQSWPVTGRPRRAGVSAFGVSGTNAHVILESAPAQASEEAQPVVTPVVTPVVASELVPLVVSAKTESALAEVEGRLRAYLAVSPGVDLRAVGSTLAVARSVFEHRAVLLGDDTVTGTVTGTAVSDPRVVFVFPGQGWQWLGMGSALRGASVVFAERMAECAAALGEFVDWDLFAVLDDPAVVDRVDVVQPASWAVMVSLAAVWEAAGVRPDAVVGHSQGEIAAACVAGAVSLRDAARIVTLRSQVIAGLAGRGAMASVALPAHEIELVEGAWIAACNGPASTVIAGEPDAVDRVLAVHEARGVRVRRITVDYASHTPHVELIRDELLNITAGIGSQAPVVPWLSTVDGTWVEGPLDAEYWYRNLREPVGFDSAVGELRAQGDTVFVEVSASPVLLQAMDDDVVSVATLRRDDGGAARMLTALAQAFVEGVTVDWPAVLGNAPGRVLDLPTYAFEHQRYWLKSRWLARLAPVEREKALLKVVCDGAATVLGHADASTIPAAGAFRDLGVDSLTAVELRNRLAKATGLRLPATLVFDYPTPTALAARL

SEQ ID NO: 35 - protein, 893 aa, Streptomyces violaceusniger
EPLAIVGMACRLPGGVSSPEDLWRLVESGTDAVSGFPTDRGWDVEDLFGPAAGDSYRLRGGFLDAAGGFDASFFGISPREALAMDPQQRLVLEVSWEAFERAGIEPGSVRGTDTGVFMGAYPGGYGIGADLGGFGTTAGAVSVLSGRVSYFFGLEGPAFTVDTACSSSLVALHQAGYALRQGECSLALVGGVTVMATPQTFAEFARQGGLAGDGRSKAFADSADGAGFSEGVGVLLVERLSDARRNGHQVLAVVRGSAVNQDGASNGLTAPNGPSQQRVIQAALNNAGLTTAEVDVVEAHGTGTTLGDPIEAQALLAAYGQDRERPLLLGSVKSNLGHTQAAAGVSGVIKMVMALRHGLVPRTLHVDEPSRHVDWSEGAVELVTENQSWPDTGRPGRAGVSSFGISGTNAHVILESAPSAQTVENTVVESAPEWVPLVMSARTQSALADYEGRLRAYLAGSPGVDLRAVASTLAVTRSVFEHRAVLMGDDTVTGSAVSDPRVVFVFPGQGSQRAGMGEELAAAFPVFAQIHQQVWDLLDVPDLDVNETGYAQPALFALQVALFGLLESWGVGPDAVVGHSVGELAAAYASGVWSLEDACTLVSARARLMQALPAGGVMVAVPVSEDEARAVLGEGVEIAAVNGPSSVVLSGDEAAVLRAAAGLGKWTRLATSHAFHSARMEPMLEEFRAVAERLTYQTPHLTMAAGEQVTTPDYWVRQVRDVVRFGEQVASFEDAVFLELGADRSLARLVDGIAMLHGDHEAQDAISAMAHLYVSGVAVDWPAVLGDVRGRVLDLPTYAFQHERYWLEGRWLAALAPAEREKALLKLVSDGAATVLGHADASTVPVSAVFRDLGVDSLTAVELRNRLAKATGLRLPATLVFDYPTPTALAARL

SEQ ID NO: 36 - protein, 922 aa, Streptomyces violaceusniger
EPLAIVGMACRLPGGVASPEDLWRLVESGTDAVSGFPTDRGWDVEDFDSAGKSYRAEGGFLDAAAGFDASFFGISPREALAMDPQQRLLLEVSWETFERAGIEPGSVRGTDTGVFMGAYPGGYGIGADLGGFGATAGATSVLSGRVSYFFGLEGPAFTVDTACSSSLVALHQAGYALRQGECSMALVGGATVMATPELFTEFSRQGGLASDGRCKAFADSADGTGWAEGVGVLLVERLSDAQAKGHQVLAVVRSSAVNQDGASNGLTAPNGPSQQRVIQAALSNAGLAAYEVDVVEAHGTGTTLGDPIEAQAVLATYGQDRERPLLLGSLKSNIGHTQAASGVSGVIKMVMALQRGLVPRTLHVDEPSRHVDWSAGAVELVRENQSWPDTEGPRRAGVSSFGVSGTNAHVILESAPAQPAEEAQPVVTPVVASELVPLVVSAKSQSALTEAEGRLRAYLAASPGVDTRAVGATLAVARSVFEHRAVLLGDDTVTGTGTAMSDPRVVFVFPGQGWQWLGMGSALRDSSVVFAERMAECAAALSDFVDWDLFTVLDDPAVVDRVDVVQPASWAVMVSLAAVWEAAGVRPDAVIGHSQGEIAAACIAGALSLRDAARIVSLRSQVIAGLAGRGAMASIALPAQDVELAEGAWIAAHNGPASTVIAGAPEAVDRVLAVHEARGVRVRRITVDYASHTPHVELIRDELLHITAGIGSQAPVVPWLSTVDGTWVEGPLDAEYWYRNLREPVGFAPAIRQLQDQGETVFIEVSASPVLLQAMDDDVVSVATLRRDDGGAARMVTALAQAYVQGVTVDWPAVLGNVPGRVLDLPTYAFEHQRYWLKSWLAALAPAEREKALLKVVCDSAAVVLGHADARSIPAAGAFKDLGVDSLMAVELRNRLVKATGLRLPATLVFDYPTPAALAARL

SEQ ID NO: 37 - protein, 925 aa, Streptomyces violaceusniger
EPLAIVGMACRLPGGVSSPEDLWRLVESGTDAVSGFPTDRGWDLEDLFDPDPEAAGKSYCVQGGFLDAAAGFDAGFFGISPREALAMDPQQRLLLEVSWEAFERAGIEPGSVRGSDTGVFIGAFPVGYGVGFDREGYGATSGPSVLSGRVSYFFGLEGPAITMDTACSSSLVALHLAAQALRNGECSMALAGGVTVMATPEVFTEFARQRGLASDGRCKAFADSADGAGFSEGAGLLLVERLSDARRNGHQVLAVVRGSAVNQDGASNGLTAPNGPSQQRVIQAALINAGLTTAEVDVVEAHGTGTTLGDPIEAQAVLATYGQGRERPLLLGSLKSNIGHTQAASGVSGVIKMVMALQRGLVPRTLHVDEPSRHVDWSAGAVELVRENQSWPDSEGPRRAGVSSFGVSGTNAHVILESAPAQPAEEAQPVVTPVVASELVPLVVSAKTESALTEVEGRLRVYLAASPGVDTRAVASTLAVTRSVFEHRAVLLGDDTVTGTGTAVSDPRVVFVFPGQGWQWLGMGSALRDSSVVFAERMAECAAALSEFVDWDLFAVLDDPAVVDRVDVVQPASWAVMVSLAAVWQAAGVRPDAVIGHSQGEIAAACVAGVLSLRDAARIVTLRSQAIAGLAGRGAMASIALPAQDVELVEGAWVAAHNGPASTVIAGAPEAVDRVLAVHEARGVRVRRIAVDYASHTPHVELIRDELLDITAGIGSQAPVVPWLSTVDGTWVEGPLDAEYWYRNLREPVGFAPAVSQLQVQGETVFVEVSASPVLLQAMDDDVVSVATLRRDDGGAARMLTALAQAYTQGVAVDWPAVLGTTTAQVLDLPTYAFQHRRYWVEWLAALAPEEREKALLRVVCDGAATVLGHADVGSIPVTAAFKDLGVDSLTAVELRNRLAKATGLRLPATLAFDYPTPTALAARL

SEQ ID NO: 38 - protein, 899 aa, Streptomyces violaceusniger
EPLAIVGMACRLPGGVSSPEDLWRLVESGTDAISGFPTDRGWDVEHLYDPDPDAPGKAYCVQGGFLDSAGGFDASFFGISPREALAMDPQQRLVLEASWEAFERAGIEPGSLRGTDTGVFMGAYPGGYGIGADLGGFGATAGAVSVLSGRVSYFFGLEGPAVTVDTACSSSLVALHQAGYALRQGECSLALVGGVTVMATPQSFVEFSRQRGLAGDGRCKAFADAADGTGWAEGVGVLLVERLSDAQAKGHQVLAVVRGSAVNQDGASNGLSAPNGPSQQRVIRQALANAGLTTAEVDVVEAHGTGTTLGDPIEAQALLATYGQDRERPLLLGSVKSNLGHTQAAAGVSGVIKMVMALRHGLVPRTLHVDEPSRHVDWSEGAVELVTENQPWPDADRPRRAGVSSFGISGTNAHVILESAPSTQAVDDVRPVEAPVVASEWVPLVVSARTLPALVEYEGRLRAYLAGSPGVDMRAVGSTLAVTRSVFEHRAVLMGDDTVTGSAVSGPRVVFVFPGQGSQRAGMGEELAAAFPVFARIHQQVWDLLDVPDLEVNETGYAQPALFALQVALFGLLESWGVGPDAVIGHSVGELAAGYVSGLWSLEDACTLVSARARLMQALPPGGVMVAVPVSEEEAKAVLCEGVEIAAVNGPSSVVLSGDETAVLRAAAALGKSTRLATSHAFHSARMEPMLDEFRAVAERLTYQTPRLPMAAGEQVTTPDYWVRQVREPVRFGEQAASCGDAVFVELGADRSLARLVDGVAMLHGDHEAQAAISALAHLYVNGVTVDWPAVLGDVPGRVLDLPTYAFQHQRYWLEGWLAALAPEERAKALLKVVCDTAATVLGHADARTIPMTGAFRDLGIDSLTAVELRNGLAKATGLRLPATLVFDYPTPTVLAARL

SEQ ID NO: 39 - protein, 926 aa, Streptomyces violaceusniger
EPLAIVGMACRLPGGVSSPEDLWRLVESGTDAISGFPTDRGWDAESLYDPDPDAPGKSYCVEGGFLDNAASFDAGFFGISPREALAMDPQQRLVLEVSWEAFERAGIEPGSVRGTDTGVFMGAYAGGYGAGADLGGFAATASATSVLSGRVSYFFGLEGPAFTVDTACSSSLVALHQAGYALRQGECSLALVGGATVMATPQSFVEFSRQRGLASDGRCKAFADAADGTGWAEGVGVLLVERLSDARRNGHQVLAVVRSSAVNQDGASNGLSAPNGPSQQGVIRQALANAGLTPAEVDVVEAHGTGTTLGDPIEAQAVLATYGQDRERPLLLGSLKSNIGHTQAASGVSGVIKMVMALQHHTVPRTLHVNEPSRHVDWSAGAVQLVRENQSWPEGDRPRRAGVSSFGVSGTNAHIILESAPAQSAEEVQPVEVPVVASDVLPLVVSAKTHSALTEAEDRLRAYLTASPEADMPAVASTLAVTRSVFEHRAVLLGDDTVTGTGTAVSDPRVVFVFPGQGWQWLGMGSALRDSSVVFAERMAECAAALSDFVDWDLFAVLDDPAVVDRVDVVQPASWAVMVSLAAVWQAAGVRPDAVIGHSQGEIAAACIAGALSLRDAARIVTLRSQVIAGLAGRGAMASIALPAQEVELAEGAWIAAHNGPASTVIAGTPEAVDLVLTAHEAQGTRVRRIAVDYASHTPHVELIRDELLDITAGIGSQAPVVPWLSTVDGTWVEGPLDAEYWYRNLREPVGFAPAVRQLQDQGETVFIEVSASPVLLQAMGDDAVTVATLRCDDGGAARMLTALAQAYTQGVAVDWPAVLGTTTARVLDLPTYAFQRQRYWVEWLAGLAPEERAKALLKVVCDTAATVLGHADARTIPLTGAFKDLGVDSLTAVELRNSLTKATGLRLPATLVFDYPTPTALAVRL

SEQ ID NO: 40 - protein, 926 aa, Streptomyces violaceusniger
EPLAIVGMACRLPGGVSSPEDLWRLVESGTDAVSGFPTDRGWDLEDLFDPDPEAAGKSYCAEGGFLDAAAGFDAGFFGISPREALAMDPQQRLLLEVSWEAFERAGIEPGSVRGSDTGVFIGAFPVGYAAGAAREGYGATAAPNVLSGRLSYFFGLEGPAITMDTACSSSLVALHLAAQAVRNGECSMALAGGVTVMATPEVFTEFARQRGLASDGRCKAFADSADGAGFSEGAGLLLVERLSDARRNGHQVLAVVRGSAVNQDGASNGFTAPNGPSQQRVIQQALANAGLTTAEVDVVEAHGTGTTLGDPIEAQAVLATYGQDREQPLLLGTLKSNIGHTQAAAGVSGVIKMVMALQHDTVPRTLHVNEPSRHVDWTAGAVELVTENQSWPVTDRPRRAGVSAFGVSGTNAHVILESAPAPSVNNAQPVETPVVASELVPLVISAKTLPALTEHEDRLRAYLAASPEADMPAVASTLAVTRSVFEHRAVLLGDDTVTGTGAAVSDPRVVFVFPGQGWQWLGMGSGLRGSSVVFAERMAECAAALREFVDWDLFAVLDDPAVVDRVDVVQPASWAVMVSLAAVWEAAGVRPDAVVGHSQGEIAAACVAGAVSLRDAARIVTLRSQVIAGLAGRGGMASVALPAHEIELVEGAWIAARNGPAATVIAGEPDAVDRVLAIHEAQGVRVRRIAVDYASHTPHVELIHDELLGVIAGVDSQAPVVPWLSTVDGTWVEGPLDAEYWYRNLREQVGFDPAVSQLRAEGDTVFVEVSASPVLLQAMDDDAATVATLRRDDGDAARMLTALAQAFVEGVTVDWPAILGTATPGVLDLPTYAFQHQRFWAERWLARLAPVEREKALLKVVCDGAATVLGHADASTIPATAAFKDLGIDSLTAVELRNGLAKATGLRLPATLVFDYPTPTALAARL

SEQ ID NO: 41 - protein, 893 aa, Streptomyces violaceusniger
EPLAIVGMACRLPGGVSSPEDLWRLVESGTDAVSGFPTDRGWDVGDLFGPAAGDSYRLRGGFLDAAGGFDASFFGISPREALAMDPQQRLVLEVSWEAFERAGIEPGSVRGTDTGVFMGAYPGGYGIGADLGGFGATASATSVLSGRVSYFFGLEGPAITVDTACSSSLVALHQAGYALRQGECSLALVGGVTVMATPQTFVEFARQGGLAGDGRSKAFADSADGAGFSEGVGVLLVERLSDAQAKGHQVLAMLRSSAVNQDGASNGLTAPNGPSQQRVIQAALSNAGLAPHEVDVVEAHGTGTTLGDPIEAQALLATYGQDRERPLLLGSVKSNLGHTQAAAGVSGVIKMVMALRNGLVPRTLHVDEPSRHVDWSVGAVELVTENQSWPDSGRPRRAGVSSFGISGTNAHVILESEPPAQVVENTVVEPAPEWVPLVMSARTQSALADYEDRLRAYLAGSPGVDLRAVGSTLAVTRSVFEHRAVLLGDDTVTGTAVSDPRVVFVFPGQGSQRAGMGEELAAAFPVFARIHQQVWDLLDVPDLEVNETGYAQPALFALQVALFGLLESWGVGPDAVIGHSVGELAAGYVSGLWSLEDACTLVSARARLMQALPAGGVMVAVPVSEEEAEAVLCEGVEIAAVNGPSSVVLSGDEAAVLRAAATLGKWTRLATSHAFHSARMEPMLEEFRAVAEGLTYRTPRLTMAAGDQIATAEYWVRQVRDVVRFGEQAASCGDAVFVELGADRSLARLVDGVAMLHGDHEAQAAISALAHLYVSGVAVDWPAVLGDVPGRVLDLPTYAFQHQRYWLEGRWLAALTPEERAKALVKVVCDSAATVLGHADASTIPVTAAFRDLGVDSLTAVELRNSLTKATGLRLPATLVFDYPTAGALAARL

SEQ ID NO: 42 - protein, 895 aa, Streptomyces violaceusniger
EPLAIVGMACRLPGGVFSPEDLWRLVESGTDAISGFPTDRGWDAENLFDPDPDAAGKSYCLEGGFLETAANFDASFFEISPREALAMDPQQRLVLEASWEAFERAGIEPGSVRGSDTGVFMGAFPGGYGIGADLEGYGATSGLNVLSGRLSYFFGLEGPAVTVDTACSSSLVALHQAGYALRQGECSLALVGGVTVMATPHTFVEFSRQRGLASDGRCKAFADSADGTGWSEGVGVLLVERLSDAQAKGHQVLAVVRGSAVNQDGASNGLSAPNGPSQQRVIRQALANAGLTIAEVDVVEAHGTGTTLGDPIEAQALLATYGQDREQPLLLGSVKSNVGHTQAAAGVSGVIKMVMALRNGLVPRTLHVDEPSRHVDWSEGAVELVTENQPWPETGRPRRAGVSSFGVSGTNAHVILESAPPAQVVDNTVVESAPEWVPLVMSARTQSALADYEDRLRAYLAGSPGVDLRAVASTLAVTRSVFEHRAVLMGDDTVTGTAVSDPRVVFVFPGQGSQRAGMGEELAAAFPVFARIHQQVWDLLDVPDLEVNETGYAQPALFALQVALFGLLESWGVRPDAVVGHSAGELAAAYVSGVWSLEDACALVSARARLMQALPAGGVMVAVPVSEEEAEAVLCEGVEIAAVNGPSSVVLSGDEAAVLRAAAGLGKWTRLATSHAFHSARMEPMLEEFRAVAEGLTYRTPRLTMAAGDQVATAEYWVRQVRDVVRFGEQVASFEDAVFLELGADRSLARLVDGVAMLHGDHEAQAAISALAHLYVNGVTIDWPAVLGGVPGRVLDLPTYAFQHERYWAEAWLAALAPAEREKALLKLVSDGAATVLGHADASTIPVTAAFKDLGIDSLTAVELRNSLAKATGLRLPATLVFDYPTPTALAARLD

SEQ ID NO: 43 - protein, 927 aa, Streptomyces violaceusniger
EPLAIVGMACRLPGGVSSPEDLWRLVESGTDAISGFPTDRGWDVENLYDPDPDAPGKSYSVRGGFLDAAANFDASFFGISPREALAMDPQQRLMLEVSWEAFERAGIEPRSVRGSDTGVFIGAYPGGYGIGVDFEGFGATAGAASVLSGRVSYFFGLEGPAFTVDTACSSSLVALHQAGYALRQGDCSLALVGGVTVMATPQTFVEFSRQRGLSADGRCKAFADSADGTGWAEGVGVLLVERLSDAQAKGHQVLGVVRGSAVNQDGASNGLSAPNGPSQQRVIRAALSNAGLAPHEVDVVEAHGTGTTLGDPIEAQALLATYGQGRGEPLLLGSLKSNIGHTQAAAGVSGVIKMVMALQYGLVPRTLHVDEPSRHVDWTAGAVELVGENQPWPETGRPHRAGVSSFGISGTNAHVILESAPAQPAEEAQPVVTPVVASELVPLVVSAKTESALTEVEGRLRAYLAASPGVDTRAVASTLAVTRSVFEHRAVLLGDDTVTGTGTAMSDPRVVFVFPGQGWQWLGMGSALRDSSVVFAERMAECAAALSDFVDWDLFTVLDDPAVVDRVDVVQPASWAVMVSLAAVWQAAGVRPDAVIGHSQGEIAAACIAGAVSLRDAARIVTLRSQAIAGLAGRGAMASIALPAQEIGLADGAWIAAHNGPASTVIAGAPEAVDRVLTAHEAQGARVRRIAVDYASHTPHVELIRDELLDITAGIGSQAPVVPWLSTVDGTWVEGPLDAEYWYRNLREPVGFAPAVRQLQAQGETVFVEVSASPVLLQAMDDDAVTVATLRRDDGDATRMLTALAQAYTHGVTVDWPAILGTTTTRALDLPTYAFQHERYWAEAWLVGLAPEERAKALLKLVSDSAAAVLGHADARGIPATGAFKDLGVDSLTAVELRNTLTKATGLRLPATMVFDYPTPADLAARL

SEQ ID NO: 44 - protein, 916 aa, Streptomyces hygroscopicus
EPLAIVGMACRLPGGVSSPEELWQLVESGGDAISPFPTDRGWDLETPYRGGFLTDPAGFDAGFFGISPREAVAMDPQQRVLLEASWEAFERAGIKPDSLRGSDTGVFVGGFSQGYGTGADLGGFGATSTQTSVLSGRLSYFYGFEGPAVTVDTACSSSLVALHQAASSLHIGECSLAVVGGVTVVATPGGFVEFARQGGLALDGRCKAFADAADGIGLAEGVGVLLVERLSDAQRNGHTVLAVVRGSAVNQDGASNGLSAPNGPSQQRVIRQALANARLTPADIDVVEAHGTGTRLGDPIEAQAILATYGQDRDQPLLLGSLKSNIGHTQAAAGVAGVIKTVMAMRHGTAPRTLHADEPSRHVDWSAGAVELLSENRLWPETDRPRRAAVSSFGVSGTNAHVILESAPAESAEGPAGMGSESMGSESGPVVVVLSAKSASALAGQEERLRAYLASGADVRAVAAGLARRSVFEHRSVILGDSTVSGVAAGVPRVVFLFPGQGTQWAGMGADLLESSPVFAARMRQCAAELSKYTDWDLFTALSDPALLDRVDVVQPVSWALMVSLAALWQHCGVQPDAVIGHSQGEIAAACVAGALTLQDGARLITGRSALIAHLSGRGTMASIALPADDLTLPDDVCIAAVNGPATTIIAGPTPAIEHLLATYEASNIHTRRIPVDYPSHTPHVEDLHDPLLAITTHLTPHTPTTPWLSTVDNTWIHTPPHPDYWYRNLRHPVQLAPAITTLTHPHPTHLIEISTHPVLLPAIDTTTTLTTTATLRRNHGTPHQLLTSLAHAHTHGATINWPALLGNPPTATTADLPTYPFQHKRYWLQDTERVAGLPAAEREQVVVKAVCETAAVVLGHAHADDILATTLFKDLGVDSLIAVELRNRLAADAGLRLPATLVFDYPTPHALATWL

SEQ ID NO: 45 - protein, 875 aa, Streptomyces hygroscopicus
EPLAIVGMACRFPGGVSSPEDLWRLVESGGDAISDIPADRGWDLETPYRGGFLADAGGFDAGFFGISPREALAMDPQQRVLLETSWEALERAEIEPGSLRGSDTGVFIGGFSQSYGIGADLGGFGTTGIQTSVLSGRLSYFFGFEGPAFTVDTACSSSLVALHQASSALRQGECSLALVGGVTVLADPSGFVEFARQGGLAADGRCKAFADTADGTSLAEGVGVLLVERLSDAQRNGHTVLAVVRGSAVNQDGASNGLSAPNGPSQQRVIRQALANARLTPADIDVVEAHGTGTRLGDPIEAQAILATYGQDRDQPVLIGSLKSNIGHTQAAAGVAGVIKMVMAMRQGTVPRTLHVDEPSHHVDWTAGSVQPITQNQEWPQAGRVRRAGVSSFGISGTNAHVIIEGVPVAEPVVVADSGVVPLVLSARTPGALLEQEERLRAYLACGADVRAVAAGLARRSVFEHRSVLVGDTVVSGTAADARLVLVFSGQGSQRAGMGEELAARFPVFAEIHQRVWDLLDVGPGLDVDDTGYAQPALFALQVALFGLLESWGVRPDVLIGHSIGELAAACVSGVWSLQDACALVSARARLMQALPAGGVMAAVPVSEAEAEAVLREGVEIAAVNGPASIVLSGDEDAVLQAAASLGRFTRLSTSHAFHCARMDPMLDEFRQVAESIAYQPPRIAMAAGDQVITPDYWVRQVREPVRFGDQVAAHADAVFLEIGPDRHLARLIDGIPTLSVDEVQSAMTALGELHVRGIDVDWATLLGTTPATPTDIPTYPFQHKHYWIDNRRISGLEPAERGQALLEIVREAAAVVLGHTDAREIAPTTAFRDLGIDSLTAIELRNRVATETGLRLPATLVFDHPTPTTLATWI

SEQ ID NO: 46 - protein, 922 aa, Streptomyces hygroscopicus
EPLAIVGMACRLPGGISSPEDLWQLVQSGGDAITDLPTDRGWDLTHLYDNDAPPVYRGGFLTDAGDFDAAFFGISPREALAMDPQQRILLETSWEAFERGGINPEAIRGSNTGVFIGGFSYGYGTGADLGGFGATSTQTSVLSGRLSYFYGFEGPAVTVDTACSSSLVALHQASSALRQGECSLALAGGVTVMATPAGFEEFARQGGLAADGRCKAFSDTADGTGWAEGVGVLLVERLSDAQRNGHTVLAVVRGSAVNQDGASNGLSAPNGPSQQRVIRQALANARLTPADIDVVEAHGTGTRLGDPIEAQAILATYGQDRDQPLLLGSLKSNIGHTQAAAGVAGIIKTVMAMRHGTAPRTLHADEPSRHVDWSAGAVELLSENRLWPETDRPRRAAVSSFGVSGTNAHVIIEQPPHTPAPEAERTTGLDVVPWLLSARTPAGLRAQAEQVSSLNEDFANIGFSLATTRTPMEHRAVVVADVSGISEAAVFAGGGSPTDVVSGLANVRGKTVFVFPGQGAQWAGMGAELFATSPVFAERMTECAAAFAALVDWSLIDVLQQREGAPSPDRVDVVQPLSFAVMVSLAALWKSHGVVPDAVTGHSQGEVAAACVSGALSLSDAATVVALRSRVIAQLAGHGGMVALPATEFAAEYWAGRLELAAVNGPASVVVAGEPEALEELLAENPNARRIPVDYASHTSRVERIREELTGLLSGLAPRQPIVPFYSTVDNQWLDKPLDAEYWYRNLRQTVRFADAVHGLADAGFRAFVEVSPHPVLTSSMRDILDERETTAVVTGTLRRDAHGVREFVRSLARLWVSGFSVDWSGLFGNGPRRIPLPTYPFQRNRYWLQAELDLVRTHAAAVLGHAGPEAVAADHPFRDLGVDSLIAVELRNRLAAETGLRLPATLVFDYPTPRALAAWLD

SEQ ID NO: 47 - protein, 875 aa, Streptomyces hygroscopicus
EPLAIVGMACRFPGGVSSPEDLWRLVETSGDAISDIPADRGWDLETPYRGGFLIGAAGFDAGFFGISPREALAMDPQQRLLLEISWEALERAGINPESVRGSDTGVFVGGSSYGYGVGADLGGFGATSTHISVLSGRVSYFFGFEGPAFTVDTACSSSLVALHQASSALRQGECSLALVGGVTVMATPAGFEEFARQGGLAADGRCKAFSDTADGTSLAEGVGVLLVERLSDAQRNGHTVLAVVRGSAVNQDGASNGLSAPNGPSQQRVIRQALANARLTPADIDVVEAHGTGTTLGDPIEAQAILATYGQDRDQPVLIGSLKSNIGHTQAAAGVAGVIKMVMAMRQGTVPRTLHVDEPSHHVDWTAGSVQPITQNQEWPQAGRVRRAGVSSFGISGTNAHVIIEGVPVAEPVVVADSGVVPLVLSARTPGALLEQEERLRAYLACGADVRAVAAGLARRSVFEHRSVLVGDTVVSGTAADARLVLVFSGQGSQRAGMGEELAARFPVFAEIHQRVWDLLDVGPGLDVDDTGYAQPALFALQVALFGLLESWGVRPDVLIGHSIGELAAACVSGVWSLQDACALVSARARLMQALPAGGVMAAVPVSEAEAEAVLREGVEIAAVNGPASIVLSGDEDAVLQAAASLGRFTRLSTSHAFHCARMDPMLDEFRQVAESIAYQPPRIAMAAGDQVITPDYWVRQVREPVRFGDQVAAHADAVFLEIGPDRHLARLIDGIPTLSVDEVQSAMTALGELHVRGIDVDWATLLGTTPATPTDIPTYPFQHKHYWIDNTRISGLEPAERGQALLEIVREAAAVVLGHTDAREIAPTTAFRDLGIDSLTAIELRNRVATETGLRLPATLVFDHPTPTTLATWI

SEQ ID NO: 48 - protein, 916 aa, Streptomyces hygroscopicus
EPLAIVGMACRLPGGISSPEDLWQLVQSGGDAITDLPTDRGWDLETPYRGGFLTDPAGFDAGFFGISPREALAMDPQQRVLLEASWEAFERAGIKPDSLRGSDTGVFVGGFSQGYGTGADLGGFGATSTQTSVLSGRLSYFYGFEGPAVTVDTACSSSLVALHQASSALRQGECSLALAGGVTVMATPAGFEEFARQGGLAADGRCKAFADTADGTGWAEGVGVLLVERLSDAQRNGHTVLAVVRGSAVNQDGASNGLSAPNGPSQQRVIRQALANARLTPADIDVVEAHGTGTRLGDPIEAQAILATYGQDRDQPLLLGSLKSNIGHTQAAAGVAGIIKTVMAMRHGTAPRTLHADEPSRHVDWSAGAVELLSENRLWPETDRPRRAAVSSFGVSGTNAHVILESAPAESAEGPAGMGSESMGSESGPVVVVLSAKSASALAGQEERLRAYLASGADVRAVAAGLARRSVFEHRSVILGDSTVSGVAAGVPRVVFLFPGQGTQWAGMGADLLESSPVFAARMRQCAAELSKYTDWDLFTALSDPALLDRVDVVQPVSWALMVSLAALWQHCGVQPDAVIGHSQGEIAAACVAGALTLQDGARLITGRSALIAHLSGRGTMASIALPADDLTLPDDVCIAAVNGPATTIIAGPTPAIEHLLATYEASNIHTRRIPVDYPSHTPHVEDLHDPLLAITTHLTPHTPTTPWLSTVDNTWIHTPPHPDYWYRNLRHPVQLAPAITTLTHPHPTHLIEISTHPVLLPAIDTTTTLTTTATLRRNHGTPHQLLTSLAHAHTHGATINWPALLGNPPTATTADLPTYPFQHKRYWLQDTERLTTQSSVEQHRLMLDLVTSHAAAVLGHSSAAAITTDTPFRDLGFDSLTAVELRNRVAADTGLRLPATLVFNHPNADALTQYL

SEQ ID NO: 49 - protein, 950 aa, Streptomyces hygroscopicus
DPIAIVAMACRLPGGVSSPEDLWRLVETGTDAIGPFPTDRGWDTELYPVPDAPGKTYCVEGGFLTGAAEFDAAFFDISPREALAMDPQQRLLLETSWEAVERARINPKSLCGKDVGVYVGAAAQGYGLGAGDQTEGTAITGGSTSLSSGRVSYALGLEGPAVTVDTACSSSLVAMHLAGQALRQGECSLALVGGVSVMASPALFVEFSRQRGLAADGRCKSFSDAADGTNWAEGVGVLILERLSDAQRNGHPVLAVIRGSAINSDGASNGLTAPNGLSQQRVIRQALTAAGLRPEDVDAVEAHGTGTRLGDPVEAEAILATYGQNREQPLLLGSLKSNIGHAAAASGVAGVIKMVQAMRNGVLPRTLHIDEPSSQVDWTSGNVALLTESRPWPDEDKPRRAGVSSFGISGTNAHIVLEQYRAAEPEDRPGDGPGERRPVAWVLSGKSPAAVRAQAGRLRAHLVGTQGWRPVDVGYALATTRADFAHRAVAVGSGPEFLHALEKLAEGASWPRLTTNRASARRVAFLFDGQGTQRLGMGRELHQRFPAFAEAWDTVDAEFAPYLDRSLTEVFFSDGGSGLMDDTLYAQAGLFAVETALFRLLAGWGVRPDFVAGHSAGEITAAHVAGVLSVTDAVRLIVARGQALRLAPPGAMASVRSSAQEVRDFIAQSGLPVDLAAINSPGSVVVAGSPETIAEFEGAWTASGRQAKRLAVRHAFHSRHVDGVLDEFRAALGGCRFGVAELPLVSTATGELASPDELGTPEHWLRHARQTVRFQDAIRALTEQGVDTFVEIGPSGTLASAGMECGGGTAAFHAVMRARQPEEVSLMTAVAELYAGGTPVEWSRVLDGRSVVDLPVYPFQRQPYWLAPADELSQPEQQKALLELVKAEAAVLLGITDATAIEDDARFLELGFDSLSATRLRNQLAKATGLALEQTLLFDFPTPAALAAHL

SEQ ID NO: 50 - protein, 879 aa, Streptomyces hygroscopicus
EPLAIVGMACRLPGGVSSPEDLWRLVESGGDVISDFPTDRGWDTTGEDSSFIRGGFLTDAGGFDAGFFGISPREAVAMDPQQRLVLETSWEVLERAGIEPGSLRGSDTGVFIGGFSQGYGAGADLGGFGATGTQTSVLSGRVSYYLGLEGPAVTVDTACSSSLVALHQAASALRQGECSLALVGGVTVMATTHSFVEFARQGGLSSDGRCRSFADSADGTGWAEGVGVLLVERLSDARRSGHPVLALVRGSAVNQDGASNGLSAPNGLSQQRVIRQALATAGLDAADVDVVEAHGTGTVLGDPIEAQAILATYGQGREEPLLLGSLKSNVGHTQAAAGVAGVIKMVMAMRQGTVPRTLHVDEPSHHVDWTAGRVELLTENRPWPQAGRVRRAGVSSFGISGTNAHVIIEGVPVAEPVVVADSGVVPLVLSARTPGALLEQEERLRAYLACGADVRAVAAGLARRSVFEHRSVLVGDTVVSGTAADARLVLVFSGQGSQRAGMGEELAARFPVFAEIHQRVWDLLDVGPGLDVDDTGYAQPALFALQVALFGLLESWGVRPDVLIGHSIGELAAACVSGVWSLQDACALVSARARLMQALPAGGVMAAVPVSEAEAEAVLREGVEIAAVNGPASIVLSGDEDAVLQAAASLGRFTRLSTSHAFHCARMDPMLDEFRQVAESIAYQPPRIAMAAGDQVITPDYWVRQVREPVRFGDQVAAHADAVFLEIGPDRHLARLIDGIPTLSVDEVQSAMTALGELHVRGIDVDWATLLGTTPATPTDIPTYPFQHKHYWIDNTRISGLEPAERGQALLEIVREAAAVVLGHTDAREIAPTTAFRDLGIDSLTAIELRNRVATETGLRLPATLVFDHPTPTTLATWI

SEQ ID NO: 51 - protein, 913 aa, Streptomyces hygroscopicus
EPLAIVGMACRLPGGISSPEDLWQLVQSGGDAITDLPTDRGWDLETPYRGGFLTDPAGFDAGFFGISPREALAMDPQQRVLLEASWEAFERAGIKPDSLRGSDTGVFVGGFSQGYGTGADLGGFGATSTQTSVLSGRLSYFYGFEGPAVTVDTACSSSLVALHQASSALRQGECSLALAGGVTVMATPAGFEEFARQGGLAADGRCKAFADTADGTGWAEGVGVLLVERLSDAQRNGHTVLAVVRGSAVNQDGASNGLSAPNGPSQQRVIRQALANARLTPADIDVVEAHGTGTRLGDPIEAQAILATYGQDRDQPLLLGSLKSNIGHTQAAAGVAGIIKTVMAMRHGTAPRTLHADEPSRHVDWSAGAVELLSENRLWPETDRPRRAAVSSFGVSGTNAHVILESAPAESAEGPAGMGSESMGSESGPVVVVLSAKSASALAGQEERLRAYLASGADVRAVAAGLARRSVFEHRSVILGDSTVSGVAAGVPRVVFLFPGQGTQWAGMGADLLESSPVFAARMRQCAAELSKYTDWDLFTALSDPALLDRVDVVQPVSWALMVSLAALWQHCGVQPDAVIGHSQGEIAAACVAGALTLQDGARLITGRSALIAHLSGRGTMASIALPADDLTLPDDVCIAAVNGPATTIIAGPTPAIEHLLATYEASNIHTRRIPVDYPSHTPHVEDLHDPLLAITTHLTPHTPTTPWLSTVDNTWIHTPPHPDYWYRNLRHPVQLAPAITTLTHPHPTHLIEISTHPVLLPAIDTTTTLTTTATLRRNHGTPHQLLTSLAHAHTHGATINWPALLGNPPTATTADLPTYPFQRRRFWAERISGLEPAERGQALLEIVREAAAVVLGHTDAREIAPTTAFRDLGIDSLTAIELRNRVATETGLRLPATLVFDHPTPTTLATWI

SEQ ID NO: 52 - protein, 887 aa, Streptomyces hygroscopicus
EPLAIVGMACRLPGGISSPEDLWQLVQSGGDAISDFPTDRGWDLTHLYDNDAPPVYRGGFLTDAGDFDAAFFGISPREALAMDPQQRLILETSWEVLERAGIEPGTLRGSETGVFVGGFTQGYGTGADLGGFGMTSGHSSVLSGRVSYFFGFEGPAVTVDTACSSSLVALHQASSALRQGECSLALVGGVTVMASPQGFTEFSRQGGLSPDGRCKAFADAADGTGWAEGVGVLLVERLSDAQRNGHTVLAVVRGSAVNQDGASNGLSAPNGPSQQRVIRQALANARLTPADIDVVEAHGTGTTLGDPIEAQAILATYGQDRDQPLLLGSLKSNIGHTQAAAGVAGVIKMVMAMRHGTAPRTLHIDEPSRHIDWTTGSVALSTENQPWPETGHPRRAGVSAFGVSGTNAHVVLEGVPVAGPPEEDVEPGVVPLLISAKSRPALMEQEQRLRTYLDGSQTDIRAVAATLAHARSVFEHRSVLVGDTVVSGTAADARLVLVFSGQGSQRAGMGEELAARFPVFAEIHQRVWDLLDVGPGLDVDDTGYAQPALFALQVALFGLLESWGVRPDVLIGHSIGELAAACVSGVWSLQDACALVSARARLMQALPAGGVMAAVPVSEAEAEAVLREGVEIAAVNGPASIVLSGDEDAVLQAAASLGRFTRLSTSHAFHCARMDPMLDEFRQVAESIAYQPPRIAMAAGDQVITPDYWVRQVREPVRFGDQVAAHADAVFLEIGPDRTLARLIDGVPLLSKEDEVQAALVALAELHVRGVPLEWSTVIGGMTSIVDLPTYPFRRKRYWIESAERLTTQSSVEQHRLMLDLVTSHAAAVLGHSSAAAITTDTPFRDLGFDSLTAVELRNRVAADTGLRLPATLVFNHPNAGDLARHL

SEQ ID NO: 53 - protein, 923 aa, Streptomyces hygroscopicus
EPLAIVGMACRLPGGISSPEDLWQLVQSGGDAITDLPTDRGWDLTHLYDNDAPPVYRGGFLTDAGDFDAAFFGISPREALAMDPQQRILLETSWEAFERGGINPEAIRGSNTGVFIGGFSYGYGTGADLGGFGATSTQTSVLSGRLSYFYGFEGPAVTVDTACSSSLVALHQASSALRQGECSLALAGGVTVMATPAGFEEFARQGGLAADGRCKAFADTADGTGWAEGVGVLLVERLSDAQRNGHTVLAVVRGSAVNQDGASNGLSAPNGPSQQRVIRQALANARLTPADIDVVEAHGTGTTLGDPIEAQAILATYGQDRDQPLLLGSLKSNIGHTQAAAGVAGIIKTVMAMRHGTAPRTLHADEPSRHVDWSAGAVELLSENRLWPETDRPRRAAVSSFGVSGTNAHVILESAPAESAEGPAGMGSESMGSESGPVVVVLSAKSASALAGQEERLRAYLASGADVRAVAAGLARRSVFEHRSVILGDSTVSGVAAGVPRVVFLFPGQGTQWAGMGADLLESSPVFAARMRQCAAELSKYTDWDLFTALSDPALLDRVDVVQPVSWALMVSLAALWQHCGVQPDAVIGHSQGEIAAACVAGALTLQDGARLITGRSALIAHLSGRGTMASIALPADDLTLPDDVCIAAVNGPATTIIAGPTPAIEHLLATYEASNIHTRRIPVDYPSHTPHVEDLHDPLLAITTHLTPHTPTTPWLSTVDNTWIHTPPHPDYWYRNLRHPVQLAPAITTLTHPHPTHLIEISTHPVLLPAIDTTTTLTTTATLRRNHGTPHQLLTSLAHAHTHGATINWPALLGNPPTATTADLPTYPFQHKRYWLQDTRLSALAPAEREQALVKAVCETAAMVLGHADTREIAATTAFKELGLDSLTAVQLRDRLAAETGRKLPATLVFDYPSPQALAAWL

SEQ ID NO: 54 - protein, 884 aa, Actinoplanes sp.
EPLAIVGMACRLPGGVASPEDLWRLVESGTDAITDFPTDRGWDLDEVADQSYCLQGGFLDNAAGFDAAFFGISPREALAMDPQQRLVLEASWEAFERAGIKPGSLRGSDTGVFMGAYPGGYGTGADLGGFGATAGAVSVLSGRISYFFGFEGPAMTVDTACSSSLVALHQAGYALRQGECSIALVGGVTVMATPQSFIEFSRQRGLAADGRCKTFADAADGTGWAEGVGVLLVERLSDARAKGHQILAVVRGSAVNQDGASNGLSAPNGPSQQRVIRQALVNAGLSPADVDVVEAHGTGTTLGDPIEAQALLTTYGQGRSVPLLLGSVKSNLGHTQAAAGVTGVIKMVMALRHGVVPRTLHVDEPSRHVDWSAGAVELVTSNREWPVVDRPGRAGVSSFGISGTNAHVILEAVPSDTPASTSTDAVLPLVVSARTAPAAEDLTARLRAYLSAAPETDQRAAAATLALTRSVFEHRAVVLGDELVSGQAVRDPRVVFVFSGQGSQRAGMGEQLAAVFPVFAEIHERVWALLDVPDGLDVDDTGHAQPALFALQVALSGLLESWGVRPAAVIGHSIGELAAAYVSGVWSLEDACALVSARARLMQALPPGGVMVAVPVPEAEARAVLRDGVEIAAVNGPSSVVLSGDEDAVLQAVSGFAKWTRLKTSHAFHSAHMDPMLDEFRAVAERLTYRRPSVEMAAGDRVTTAEYWVRQVREAVRFGDQTTAYEDAVFVEIGPGRTLARLIDGITMLHGDTEREAALTGLSQLFVRGVDVDWATVIEDTTARILDLPTYAFQHENYWLHWLSGLTPAEREQALLTAVRENAAAVLGHADARTVPVNSAFRDLGFDSLTAIELRNSLAKATGLSLPATMAFDYPTPAVLATRL

SEQ ID NO: 55 - protein, 906 aa, Actinoplanes sp.
EPLAIVGMACRLPGGVSSPEELWRLVESGVDAISGFPVDRGWDVENLFDPDPDAAGKSYCVQGGFLDSAAEFDAAFFGISPREALAMDPQQRLVLETSWEAFERAGIEPGSIKGSDTGVFMGAYQGGYGSGADLGGFGATAGATSVLSGRVSYFFGFEGPAMTVDTACSSSLVALHQAGYALRQGECSLALVGGVTVMATPQSFVEFSRQRGLAVDGRSKAFADAADGTGWAEGVGVLLVERLSDAQAKGHQILAVVRGSAVNQDGASNGLSAPNGPSQQRVIRQALANASLTPADVDVVEAHGTGTTLGDPIEAQAVIATYGQDRSTPLLLGSLKSNIGHTQAAAGVSGVIKMVMALRHGVVPQTLHVDQPSRHVDWSAGAVELLTSNQPWPSSERARRAGVSAFGVSGTNAHVILESAPAEPVVAEAGPVPVVSDVLPLVLSAKSAPALRALEQRLRAYDGAAGRALATARATFDHRAVLIGDDTVTGVAVPDPRVVFVFPGQGWQWLGMGRELRGSSVVFAERMAECAAALSEFVDWDLFAALDDPAVVDRVDVVQPVCWAVMVSLAAVWQAAGVNPDAVVGHSQGEIAAAVVAGSLSLRDGARVVALRSQLIKGLAGRGAMASIALPADQIGLVEGAWIAALNGPSSTVIAGTPEAVEQVLAAQDARVRRIAVDYASHTPQVEAIRDELLELTAGVSSQPPTVPWLSTVDNTWVEGPLPADYWFRNLREQVGFAQAVVTLGDAVFVEVSGSPVLMQSMGDAVTVASFRRDDGSATRMVTSLAEAYVQGVNVNWAAVLGAGTERALDLPTYPFQRQHYWISLAALPPAERERALLKVVRDSAAVVLGHADGRTVPATAAFKDLGLDSLTAVELRNSLRKATGLQLPATLVFDYPSPVALAARL

SEQ ID NO: 56 - protein, 911 aa, Actinoplanes sp.
EPLAIVGMSCRLPGGVSSPEDLWRLVESGVDAISGFPVDRGWDAEGLFDPDPDAAGKTYCVQGGFLEAAGEFDTAFFGISPREALAMDPQQRVLLEASWEAFERAGIGADTVRGTDTGVFIGAYPVAYGAGVDREGYGATAAPNVLSGRLSYFFGLEGPAITVDTACSSSLVALHLAASALRNGECSLALAGGVTVMATPEVFTEFARQRGLAFDGRSKSFADAADGAGFSEGAGLLVLERLSDARRNGHQVLAVIRGSAVNQDGASNGFTAPNGPSQQRVIEAALGNAGLTTAEVDVVEAHGTGTKLGDPIEAQAVLATYGQDRDLPLLLGSLKSNIGHTQAASGVAGVIKMVMALRHGVVPQTLHVDEPSRHVDWSAGAVELVTSNQPWPSSERPRRAGVSAFGVSGTNAHVILESAPVEPVVAEAGPVPVVGDVLPLVVSAKSAPALTVLEQRLRAYEAADEKAVAATLAAARATFGHRAVLLGGDTVTGVAVPDPRVVFVFPGQGWQWLGMGRELRGSSVVFAERMAECAAALSEFVDWDLFTALDDPAVVDRVDVVQPVCWAVMVSLAAVWQASGVNPDAVVGHSQGEIAAAVVAGSLSLRDGARVVALRSQLIKGLAGRGAMASIALPAAEIDLVEGSWIAALNGPSSTVIAGTPEAVEQVLAVQDARVRRIAVDYASHTPQVEAIRDELLELTGEVVSRKPDVPWLSTVDNAWIEGPLGADYWFRNLREQVGFAQAVVTLGDAVFVEVSASPVLMQSMGDAVCVPSLRRDDGTATRMVTSLAEAYVQGVQVNWAAVLGAGTERALDLPTYPFQRQHYWALHWLARLSPAEREQALLKLVCESASVVLGHADAGAIPVTAAFKDLGVDSLTAVELRNSLATATGQRLPATAVFDYPTPAVLAARL

SEQ ID NO: 57 - protein, 879 aa, Actinoplanes sp.
EPLAIVGMACRLPGGVSSPEGLWRLVVSGSDVISGFPADRGWGVEGLRGGFLPGAADFDAGFFGISPREALAMDPQQRLVLEASWEVLERAGIAPGSLRGSDTGVFMGAYPGGYGIGADLGGFGATAGAVSVLSGRVSYFFGFEGPAMTVDTACSSSLVALHQAGHALRNSECSLALVGGVTVMASPQTFVEFERQGGLAADGRSKAFSDGADGAGFSEGVGVLLVERLSDARAKGHQILALVRGSAVNQDGASNGLTAPNGPSQQRVIRQALANASLTVADVDVVEAHGTGTTLGDPIEAQALLATYGQDRDRPLLLGSVKSNLGHTQAAAGVTGVIKMVMALRHGVVPRTLHVDEPSRHVDWSAGAVELVTSNREWPVTDRPGRAGVSSFGISGTNAHVILEAVPVVSAVSTGGEVQPLVVSARTAPAAEDLTARLRTYLADTPDTDQRAAATTLALTRSVFEHRAVLLGDDTITGAAVPDPRVVFVFSGQGSQRAGMGEQLAAAFPVFAEIHERVWALLDVPDGLDVDDTGHAQPALFALQVALSGLLESWGVRPAAVIGHSIGELAAAYVSGVWSLEDACVLVSARARLMQALPPGGVMVAVPVPEAEARAVLRDGVEIAAVNGPSSVVLSGDEDAVLQAVAGFAKWTRLKTSHAFHSAHMDPMLDEFRAVAERLTYRRPSVEMAAGHGVTTAEYWVRQVREAVRFGDQTTAYEDAVFVEIGPGRTLARLIDGITMLHGDTEREAALTGLSQLFVRGVDVDWPAVIEDTTARILDLPTYPFQRQRYWLTPRWLAGMSPEDRRQALLRVVRDSAAVVLGHAEAGTIPPNAAFKDLGIDSLTAVELRNSLATATGLRLPATLVFDYPAPETLAARLD

SEQ ID NO: 58 - protein, 892 aa, Actinoplanes sp.
EPLAIVGMACRLPGGVASPEDLWRLVASGTDAISGFPTDRGWDVEGLFDPDPDVAGKTYCVQGGFLDTAARFDAAFFGISPREALAMDPQQRLVLEASWEAFERAGIEPGSLRGSDTGVFMGAFPGGYGLGADLEGYGVTGGPNAVSGRLSYFFGLEGPAFTVDTACSSSLVALHQAGYALRQGECSLALVGGVTVMGTPQTFVEFSRQRGLAVDGRSKSFSDQADGTGWSEGVGVLVVERLSDARAKGHQILAVVRGSAVNQDGASNGLTAPNGPSQQRVIRQALANASLTVADVDVVEAHGTGTTLGDPIEAQALLATYGQDRDRPLLLGSVKSNLGHTQAAAGVAGVIKMVMALQHGIVPQTLHVSEPSRHVDWTAGAVELVTSNQPWPSSGRPGRAGVSAFGVSGTNAHVILEGVPSNTPVSTAAGDVLPLVVSARTAPAVEDLTARLRTYLADTPGTDQRAAATTLALTRSVFEHRAVLLGEDTITGVAVPDSRVVFVFSGQGSQRAGMGEQLAAAFPVFAAIHERVWALLDVPDGLDVDDTGHAQPALFALQVALSGLLESWGVRPDAVIGHSIGELAAAYVSGVWSLEDACALVSARARLMQALPSGGVMVAVPVPEAEARAVLRDGVEIAAVNGPSSVVLSGDEDAVLQAVAGFAKWTRLKTSHAFHSAHMDPMLDEFRAVAERLTYRRPSVEMAAGDRVTTAEYWVRQVREAVRFGDQTTAYEDAVFVEIGPGRTLARLIDGITMLHGENEGHAALAALSHLFVQGVRVDWPAVLGTTAERVDLPTYPFQHEHYWARAEHWLAGLPADEREKALLKIVRDSAAAVLGHADGRTVASGAVFKELGLDSLTAVELRNSLGKATGLRLPSTAAFDYPTPAALATRL

SEQ ID NO: 59 - protein, 908 aa, Actinoplanes sp.
EPLAIVGMACRLPGGVSSPEDLWRLVESGSDAISGFPTDRGWDVDGLFDPDPDAAGKSYCVQGGFLDSAAEFDAAFFGISPREALAMDPQQRLLLETSWEAFERAGIDPGSVRGSDTGVFVGAFPGGYGAGADIEGYGATAGPSVLSGRLSYFFGLEGPAFTVDTACSSSLVALHQAGHALRQGECSLALVGGVTVMASPVTFVEFSRQRGLAADGRCKAFGDGADGTGWSEGVGVLLVERLSDAQAKGHQILAVVRGSAVNQDGASNGLTAPNGPSQQRVIQAALASAGLVTSDVDVVEAHGTGTTLGDPIEAQAVLATYGQDRSTPLLLGSLKSNIGHTQAAAGVSGVIKMVMALRHGVVPQTLHADEPSRHVDWSAGAVELLTSNRSWPSSERARRAGVSAFGVSGTNAHVILESAPVEPVVAVAGPVPVVSDVLPLVLSAKSAPALTALEQRLRVYDGAAGRALATARATFDHRAVLIGDDTVTGVAVPDPRVVFVFPGQGWQWLGMGRELRDSSVVFASRMAECAAALSEFVDWDLFTALDDPAVVDRVDVVQPVCWAVMVSLAAVWQASGVNPDAVVGHSQGEIAAAVVAGSLSLRDGARVVALRSQLIKGLAGRGAMASIALPAAEIDLVEGSWIAALNGPSSTVIAGTPEAVEQVLAVQDARVRRIAVDYASHTPQVEAIRDELLELTAEVESRRPDVPWLSTVDNTWVEGPLSADYWFRNLREQVGFAQAVVTLGDAVFVEVSASPVLMQSMGDAVTVATLRRDDGSALRMVTSLAEAYVQGVNVNWAAVLGAGTERALDLPTYPFQRQHYWVTAQSLAGLPAEDREKALLKIVRDSAAQVLGHPDGRAVPAGAAFIELGVDSLTGVEMRNRLGGITGLRLPATMVFDYPTPAALAGRL

SEQ ID NO: 60 - protein, 910 aa, Actinoplanes sp.
EPLAIVGMACRLPGGVSSPEELWRLVESGVDAISGFPVDRGWDVENLFDPDPDAAGKSYCVQGGFLDTAAEFDAAFFGISPREALAMDPQQRLVLETSWEAFERAGIEPGSLKGSDTGVYMGAFSGGYAADLEGFGATAGATSVLSGRVSYFFGFEGPAMTVDTACSSSLVALHQAGYALRQGECSLALVGGVTVMASPQSFVEFSRQRGLAADGRSKAFADAADGTGWAEGVGVLLVERLSDAQAKGHQILAVVRGSAVNQDGASNGLSAPNGPSQQRVIRQALANASLTPADIDVVEAHGTGTTLGDPIEAQAVIATYGQDRSTPLLLGSLKSNIGHTQAAAGVSGVIKMVMALRHGVVPQTLHVDQPSRHVDWSAGAVELVTSNQPWPSSERPRRAGVSAFGVSGTNAHVILESAPAEPVVAEVGLVPVVSDVLPLVLSAKSAPALTVLEQRLRAYEAADERTVAATLATARATFDHRAVLIGTETVTGPLMTDPRVVFVFPGQGWQWLGMGRELRGSSVVFAERMAECAAALSDFVDWDLFTALDDPAVVDRVDVVQPVCWAVMVSLAAVWQAAGVNPDAVVGHSQGEIAAAVVAGSLSLRDGALVVALRSQLIKGLAGRGAMASIALPADQIGLVEGAWIAALNGPSSTVIAGSPEAVEQVLAAQDARVRRIAVDYASHTPQVEAIRDELLELTAGVSSQPPTVPWLSTVDNTWVEGPLPADYWFRNLREQVGFAQAVVTLGDAVFVEVSASPVLMQSMGDAVCVPSLRRDDGSATRMVTSLAEAYVQGVNVNWAAVLGAGTERALDLPTYPFQRQRYWAGHWLARLAPGERETALLKLVSESAAAVLGHADARSIPATAVFRDLGMDSLTAVEVRNSLAKTTGLRLPATLAFDYPTPAVLAARL

SEQ ID NO: 61 - protein, 878 aa, Actinoplanes sp.
EPLAIVGMACRLPGGVSSPEGLWRLVVSGSDVISGFPADRGWGVEGLRGGFLPGAADFDAGFFGISPREALAMDPQQRLVLEASWEVLERAGIAPGSLRGSDTGVFMGAYPGGYGIGADLGGFGATAGAVSVLSGRVSYFFGFEGPAMTVDTACSSSLVALHQAGHALRNSECSLALVGGVTVMASPQTFVEFERQGGLAADGRSKAFSDGADGAGFSEGVGVLLVERLSDARAKGHQILALVRGSAVNQDGASNGLTAPNGPSQQRVIRQALANASLTVADVDVVEAHGTGTTLGDPIEAQALLATYGQGRSVPLLLGSVKSNLGHTQAAAGVTGVIKMVMALRHGVVPRTLHVDEPSRHVDWSAGAVELVTSNREWPVVDRPGRAGVSSFGISGTNAHVILEGIPSNTPVSTAAGAVLPLVVSARTAPAAEDLTARLRAYLSAAPETDQRAAAATLALTRSVFEHRTVLLGDDTITGAAMPDPRVVFVFSGQGSQRAGMGEQLAAVFPVFAEIHERVWALLDVPDGLDIDDTGHAQPALFALQVALSGLLESWGVRPDAVIGHSIGELAAAYVSGVWSLEDACALVSARARLMQALPPGGVMVAVPVSEAEARTVLRDGVEIAAVNGPSSVVLSGDEDAVLQAVSGFAKWTRLKTSHAFHSAHMDPMLDEFRAVAERLTYRRPSVEMAAGHGVTTAEYWVRQVREAVRFGDQTTAYEDAVFVEIGPGRNLARLIDGITMLHGDTEREAALTGLSQLFVRGVDVDWATVIEDTTARILDLPTYPFQHERYWLSWLVGLPPAERAKALLKTVRDSAAVVLGHQGTRAIPVDGAFRELGMDSLTAVELRNSLAKATGLSLSATLVFDYPTPKVLADHLD

SEQ ID NO: 62 - protein, 907 aa, Actinoplanes sp.
EPLAIVGMACRLPGGVSSPEELWRLVESGSDAISGFPVDRGWDADGLFDPDPDAAGKSYCVQGGFLDTAAEFDAAFFGISPREALAMDPQQRLVLETSWEAFERAGIEPGSIKGSDTGVFIGAYPGGYGSGVELGGFGATSGAGSVLSGRVSYFFGFEGPAMTVDTACSSSLVALHQAGYALRQGDCSMALVGGVTVMSTPHIFVEFSRQRGLAADGRCKAFGDGADGTGWSEGVGVLLVERLSDARAKGHQVLAVVRGSAVNQDGASNGLTAPNGPSQQRVIHAALASAGLVTSDVDVVEAHGTGTTLGDPIEAQAVIATYGQDRSTPLLLGSLKSNIGHTQAAAGVSGVIKMVMALRHGVVPQTLHVDQPSRHVDWSAGAVELLTSNQPWPSSERARRAGVSAFGVSGTNAHVILESAPVEPVVAEAGPVPVVSDVLPLVLSAKSAPALRALEQRLRVYDGAAGRALATARATFDHRAVLIGDDTVTGVAVPDPRVVFVFPGQGWQWLGMGRELRGSSVVFAERMAECAAALSEFVDWDLFAALDDPAVVDRVDVVQPVCWAVMVSLAAVWQAAGVNPDAVVGHSQGEIAAAVVAGSLSLRDGALVVALRSQLIKGLAGRGAMASIALPATEISLVEGAWIAALNGPSSTVIAGSPEAVEQVLAVQDARVRRIAVDYASHTPQVEAIRDELLELTAGVSSQLPTVPWLSTVDNTWVEGPLPADYWFRNLREQVGFAAAVQELGESVFVEVSGSPVLIQSMGDAVTVATLRRDDGSATRMVTSLAEAYVQGVQVNWAAVLGAGSERALDLPTYPFQRDHFWVLSLAALPSAEREKALVKIVCESAAAVLGHTDTSAVPAAAAFKELGLDSLTAVDLRNRLRRATGLQLPATLVFDYPTPTAMAARL

SEQ ID NO: 63 - protein, 911 aa, Actinoplanes sp.
EPLAIVGMSCRLPGGVSSPEDLWRLVESGSDAISGFPTDRGWDVDGLFDPDPDAAGKTYCVQGGFLEAAGEFDAAFFGISPREALTMDPQQRVLLEASWEAFERAGIAPTSVRGTDTGVFIGAFPVGYGAGADHEGYTATAGVGSVLSGRLSYFFGLEGPAMTMDTACSSSLVALHLAASALRNGECSLALAGGVTVMATPEVFTEFARQRGLAADGRCKPFADAADGAGFSEGAGLLVLERLSDARRNGHQVLAVIRGSAVNQDGASNGLTAPNGPAQQRVIRQALANAGLNSSDVDVLEAHGTGTTLGDPIEAQAVLATYGQDRSTPLLLGSLKSNIGHTQAASGVAGVIKMVMALRNGLVPRSLHLDEPSRHVDWSAGAVELLTSNQPWPSSDRPRRAGVSAFGVSGTNVHVILESAPAEPVGAEAGPLPVVGDVLPLVVSAKSAPALTALEQRLRAHVAADERAAAATLATARATFDHRAVLIGAETVTGVAAVDPRVVFVFPGQGWQWLGMGRELRGSSVVFAERMAECAAALSEFVDWDLFTALDDPAVVDRVDVVQPVCWAVMVSLAAVWQAVGVNPDAVVGHSQGEIAAAVVAGSLSLRDGALVVALRSQLIAGLAGRGAMASIALPADQISLVEGAWIAALNGPSSTVIAGTPEAVEQVLAAQDARVRRIAVDYASHTPQVEAIRDELLELTGEVVSRKPDVPWLSTVDNAWIEGPLGADYWFRNLREQVGFAQAVVTLGDAVFVEVSASPVLMQSMGDAVCVPSLRRDDGTATRMVTSLAEAYVQGVQVNWAAVLGAGTERALDLPTYPFQRERFWVLWLAGLAPQERETALLKLVCDSAAVVLGHGDGQAIPDTTAFKDLGVDSLTAVEVRNRLAAATGLRLPATMVFDYPTPTALAARL

SEQ ID NO: 64 - protein, 877 aa, Actinoplanes sp.
EPLAIVGMACRLPGGVASPEDLWRLVESGTDAITGFPADRGWTTEPGQGGFLADAAGFDAAFFGISPREALAMDPQQRLLLETSWEAFERAGIAPLSLRGSDTGVYIGAYPDGYGIGADLGGFGTTAGSPSVLSGRVSYFFGLEGPAITVDTACSSSLVALHQAGYALRNNECSLALVGGVTVMATPEVFSAFALQDGLAADGRSKAFSDGADGAGFSEGVGVLLVERLSDAQANGHQILALVRGSAVNQDGASNGLTAPNGPSQQRVIRQALANASLTPADVDVIEAHGTGTTLGDPIEAQALLATYGQGRSVPLLLGSVKSNLGHTQAAAGVTGVIKMVMALRHGVVPRTLHVDEPSRHVDWSAGAVELVTSNREWPVTDRPGRAGVSSFGISGTNAHVILEAVPVVSAVSTGGEVQPLVVSARTAPAAEDLASRLRTYLADTPDTDQRAAAATLALTRSVFEHRTVLLGDDTITGAAMPDPRVVFVFSGQGSQRAGMGEQLAAVFPVFAEIHERVWALLDVPDGLDIDDTGHAQPALFALQVALSGLLESWGVRPDAVIGHSIGELAAAYVSGVWSLEDACALVSARARLMQALPPGGVMVAVPVPEAEARTVLRDGVEIAAVNGPSSVVLSGDEDAVLQAVSGFAKWTRLKTSHAFHSAHMDPMLDEFRTVAERLTYRRPSVEMAAGHGVTTAEYWVRQVREAVRFGDQTTAYEDAVFVEIGPGRTLARLIDGITMLHGDTEREAALTGLSQLFVRGVDVDWATVIEDTTARILDLPTYPFQHERYWAGRWLAGLAPDKRDAALLTMVRDSAARVLGHADGSAISPTATFRDLGVDSLTAVELRNRLARTAGLRLATTIVFDYPTPTALAAHL

SEQ ID NO: 65 - protein, 883 aa, Actinoplanes sp.
EPLAIVGMACRLPGGVASPEDLWRLVESGTDAITGLPTDRGWDLGAVAAESYCVEGGFLDGVAGFDAAFFGISPREALAMDPQQRLLLETSWESLERAGIAPLSLRGSDTGVFMGAYPGGYGAGADLGGFGTTSGAASVLSGRISYFFGLEGPAMTVDTACSSSLVALHLAGQALRNGECSLALVGGVTVMAAPDIFPEFARQRGLASDGRSKAFADSADGTGWSEGVGVLLVERLSDAQANGHQILALVRGSAVNQDGASNGLTAPNGPSQQRVIRQALANASLTPADVDVIEAHGTGTTLGDPIEAQALLATYGQGRSVPLLLGSVKSNLGHTQAAAGVTGVIKMVMALRHGVVPQTLHVDEPSRHVDWSAGAVELVTSNREWPVTDRPGRAGVSSFGISGTNAHVILEAVPSDTPAPTTTDAVLPLVVSTRTAPAAEDLTARLRAYLSAAPETDQRAAAATLALTRSVFEHRAVVLGEDTITGVAVPDPRVVFVFSGQGSQRAGMGEQLAAAYPVFAAIHERVWALLDVPDGLDVDDTGHAQPALFALQVALSGLLESWGVRPAAVIGHSIGELAAAYVSGVWSLEDACVLVSARARLMQALPPGGVMVAVPVPEAEARAVLRDGVEIAAVNGPSSVVLSGDEDAVLQAVSGFAKWTRLKTSHAFHSAHMDPMLDEFRAVAERLTYRRPSVEMAAGDRVTTAEYWVRQVREAVRFGDQTTAYEDAVFVEIGPGRTLARLIDGITMLHGDTEREAALTGLSQLFVRGVDVDWATVIEDTTARILDLPTYPFQHEHYWLRRAARTPAERAQELLKLVRDNAAAVLGHADGRTVPAAAAFRDLGVDSLIAVELRNNLALATGLQLPTTIVFDYPTASSLAERL

SEQ ID NO: 66 - protein, 911 aa, Actinoplanes sp.
EPLAIVGMACRLPGGVESPEDLWRLVESGADAISGFPTDRGWDADGLFDPDLAVGKTYCVQGGFLQTAAEFDPAFFGISPREALAMDPQQRLVLETSWEAFERAGIEPGSLKGSDTGVFMGAYPGGYGMGADLGGFAATAGAGSVLSGRVSYFFGFEGPAMTVDTACSSSLVALHQAGYALRQGECSLALVGGVTVMASPQSFVEFSRQRGLAADGRSKAFADAADGTGWAEGVGVLLVERLSDAQAKGHRILAVVRGSAVNQDGASNGLSAPNGPSQQRVIRQALANASLTPADIDVVEAHGTGTTLGDPIEAQAVIATYGQDRSTPLLLGSLKSNIGHTQAAAGVSGVIKMVMALRHGVVPQTLHVDQPSRHVDWSAGAVELVTSNQPWPSSERPRRAGVSAFGVSGTNAHVILESAPVEPVGAEAGLVPVVADVLPWVVSAKSAPALRALEQRLRAYEAADERTVVATLATARATFDHRAVLIGTETVTGPLMTDPRVVFVFPGQGWQWLGMGRELRGSSVVFAERMAECAAALSEFVDWDLFTALDDPAVVDRVDVVQPVCWAVMVSLAAVWQAAGVNPDAVVGHSQGEIAAAVVAGSLSLRDGALVVALRSQLIKGLAGRGAMASIALPADQIDLVEGAWIAALNGPSSTVIAGTPEAVEQVLAAQDARVRRIAVDYASHTPQVEAIRDELLELTAEVLSRKPDVPWLSTVDNTWVEGPLPADYWFRNLREQVGFAQAVVTLGDAVFVEVSASPVLIQSMGDAVTVATLRRDDGSATRMVTSLAEAYVQGVQVNWGAVLGAGTERALDLPTYPFQRQHYWALERLGERAGTERHRLMLEVVLGHAASVLGHSSAAALEPDRPFKDLGMDSLTAIELRNHLVAETGLRLPATMVFDFPTADALAGHL

SEQ ID NO: 67 - protein, 934 aa, Actinoplanes sp.
EPIAVVSMACRLPGGVDTPEGLWRLVESGTDAISGFPTDRGWDLTDFYSADPQGGFLTGAAEFDAGFFGISPREALGMDPQQRLLLETTWEAIERAQLDPRSLRGRDVGVYVGGAAQGYGVGFAGEPRDNAITASSISLLSGRVSYALGLQGPGVTVDTACSSSLVALHLACQALRQRECSLALVGGVSVIATPDVFAEFSRQNGLAADGRCKSFGAAADGTGWSEGVGMLVLERLSEATRHGHRILAVVRGSAVNSDGASNGLTAPNGQSQQRVIRQALSNAGLAASDVDVVEAHGTGTRLGDPIEAEAILATYGQDRAAPAWLGSLKSNIGHTMAASGVLGVIKMVEAMRHGTVPRTLHVDEPSPHVDWSAGRVALLTENQPWPDGAKPRRAGVSSFGLSGTNAHVVLEQHPEPASPVPARETGPVPWVLSAQSPKALQEQAGRLHAALVSDPRWHPLDVAFSLATTRSAFTHRTAVVASGRDLLEALSTLATSATATSTTARTRRVAFLFDGQGTQRAGMGRELYERHPAFARAWDEVSAAFDKHLEHPLHAVYFGAGALDELVDDTGYAQAAIFTFEVALFELLHEWGVRPDFVAGHSIGEVAAAYVSGLFSLADAAQLIVARGRALRSAPPGAMAALRAGETETREFLARTGTALDVAAVNSPEAVVVSGSPEAVAEFTAAWTASGRRARRLNVNRAFHSRHVDGLLDDFRAVLESLTCRTDTVLPMVSTVTGRLIDPAELRTPQYWLSQVRDTVRFQDAVAELAANGVGVFVEVGPSSSLASAGTETLGDEAHFQALQHSRTPADPALLTALAGLHSGGVGVDWEKVLVGGRAVELPVYPFQHRAYWLAPASTQEPATMLELVRFEVAAVLGMPDPAAVFEETSFLELGFDSLSAVRLRNRLTRSTGVELPATLLFDHPTPAELAAHL

SEQ ID NO: 68 - protein, 928 aa, Streptomyces hygroscopicus
EPLAIVGMACRLPGGVASPEDLWRLVESGTDAISDFPTDRGWDVEGLYDPDPDVPGKSYAVKGGFLDAAGFDAAFFGISPREAAAMDPQQRLVLEASWEAFERAGIEPGSVRGSDTGVFMGAMANGYGAGADLGGFGATAGAGSVLSGRISYFFGLEGPAMTVDTACSSSLVALHQASFALRQGECSLALVGGVTVMPTPQLFVEFARQRGLAVDGRSKAFADAADGSGFSEGVGVLVVERLSDAQAKGHRVLAVVRGSAVNQDGASNGLSAPNGPSQQRVIRQALDNAGLSSMDVDVVEGHGTGTRLGDPIEAQAVISTYGQDRERPLLLGSLKSNIGHAQAAAGVSGVIKMVMALRHGVVPQTLHVDEPSRHVDWAAGAVELVTENQPWPVAERARRAGVSSFGISGTNAHVILESAPAEAASASEPVTPPSEVSVPVVASDVVPLVVSAKTPGALTDIEERLRGYLAAAPEADMQAVASTLAATRSVFEHRAVLLGDDTITGIATPDPRVVFVFPGQGWQWLGMGSVLRETSPVFAGRMAECAAALREFVDWDLFSVLDDPTVVDRVDVLQPACWAVMVSLAAVWQEAGVSPDAVIGHSQGEIAAACVAGAVSLRDAARIVALRSKLIGARLGHGAMASIALPADAITLTDGAWIAAHNGPASTVIAGTPQAVDTVLAAYEAQGIRVRRITVDYASHSPQVEEIHTELLDATATVGSQTPAVPWLSTVDGAWVEGPLDADYWYRNLREPVRFDQAVTHLQTQGETVFIEVSASPALTPAMNDDAITVATLRRDDDSPTRILTALAEAFVQGVGVDWPAVTGATTARVLDLPTYAFQRQRYWTLSGLAAAERRQALAKLVRESAAVVLGHADPDSVPAAAAFKDLGVDSLTAVELRNSLGRSTGLRLPATMVFDYPTPDALAARLD

SEQ ID NO: 69 - protein, 901 aa, Streptomyces hygroscopicus
EPLAIVGMACRLPGGVDSPEDLWRLVESGTDAISGFPTDRGWDLDSLYDPILGASGEFYSAQGGFLDRAADFDASFFGISPREALAMDPQQRLVLEVSWEALERAGIEASSVRGSDTGVFMGAMANGYGIGADFGAFGMTASAGSVLSGRVSYFFGLEGPAMTVDTACSSSLVALHQAGYSLRQGECSMALVGGVTVMPTPQTFVEFARERGLAVDGRSKAFADAADGSGFSEGVGVLVVERLSDARARGHRVLAVVRGSAVNQDGASNGLSAPNGPSQQRVIRQALANAGLASADVDVVEAHGTGTRLGDPIEAQAVIETYGQDRERPLLLGSLKSNIGHTQAAAGVSAVIKMVMALRHGVVPQTLHVDEPSRHVDWTAGAVELATEKLPWPASDRVRRAGVSSFGISGTNAHVILESVPAEVVSPSESSGPNLASDVVPLVVSAKTSGALVDIEERLRGYLAAVPGVDLGAVASVLAGSRSVFGHRGVLVGGELVSGVALSGPRVVFVFSGQGSQCVGMGERLAGVFPVFAEVYGRVWDLLDVPGSGLGVDDTGFVQPALFALQVGLFGLLESWGVRPEVVVGHSVGEVAAGYVAGLWSLEDACVLVSARARLMQGLPGGGVMVSVSVSEERARAALVEGVEIAAVNGPSSVVLSGDEAAVVGVAEGLGGRWRRLATSHAFHSARMDPMLDEFRVVAEGLEYREPRIVMAGGAGVVSPEYWVRQVRDTVRFGDQVAAYQGDAVFVEVGPGGSLARLIDGVAVGDGEDEVRAAVMAVAELFVRGVDVDWPAVVGTTATPVDLPTYPFQRQRYWTASWLVALEPEERGQALLRMVREGASVVLGHADARAVEVDRAFRDLGVDSLTAVQVRNNLAKATGLRLPATMVFDYPTPAALAARLD

SEQ ID NO: 70 - protein, 901 aa, Streptomyces hygroscopicus
EPLAIVGMACRLPGGVASPEDLWRLVESGTDVISGFPTDRGWDLDNLYDPDPAVGKSYCVQGYFLDDVADFDASFFGISPREALAMDPQQRLILEASWEAFERAGIEPGSVRGSDTGVFMGAFSSGYGIGADHSGFGMTAGAGSVLSGRISYLFGLEGPAMTVDTACSSSLVALHQASSALRQGECSLALVGGVTVMPTPQTFLEFARQRGLAADGRSKAFSDAADGSGFSEGVGVLVVERLSDARARGHRVLAVVRGSAVNQDGASNGLSAPNGPSQQRVIRQALANAGLSSADVDVVEAHGTGTRLGDPIEAQAVIETYGQDRERPLLLGSLKSNIGHTQAAAGVSAVIKMVMALRHGVVPQTLHVDEPSRHVDWTAGAVQLATEKQPWPASDRARRAGVSSFGISGTNAHVILESAPVHSVETDETAPMALASDVVPLVVSAKTSGALVDIEERLRGYLAVAGSEVDLGAVASVLAGSRSVFGHRGVLVGGELVSGVALSGPRVVFVFSGQGSQCVGMGERLAGVFPVFAEVYGRVWDLLDVPGSGLGVDDTGFVQPALFALQVGLFGLLESWGVRPEVVVGHSVGEVAAGYVAGLWSLEDACVLVSARARLMQGLPGGGVMVSVSVSEERARAALVEGVEIAAVNGPSSVVLSGDEAAVVGVAEGLGGRWRRLATSHAFHSARMDPMLDEFRVVAEGLEYREPRIVMAGGAGVVSPEYWVRQVRDTVRFGDQVAAYQGDAVFVEVGPGGSLARLIDGVAVGDGEDEVRAAVMAVAELFVRGVDVDWPAVVGTTAAPVDLPTYPFQRQRYWTQTWLTGLASEDRRQALLKVVRDSAATVLGHADAGMIPATAAFKDLGLDSLTAVELRNSLGKSTGLSLPATMVFDYPTPDALADRLD

SEQ ID NO: 71 - protein, 926 aa, Streptomyces hygroscopicus
EPLAIVGMACRLPGGVASPEDLWRLVESGTDAISDFPTDRGWDVEGLYDPDPDAPGKSYAVKGGFLDAAGFDAAFFGISPREALAMDPQQRLVLEASWEAFERAGIEPGSVRGSDTGVFMGAFPAGYGGDREGFGATAGAGSVLSGRVSYFFGLEGPAITVDTACSSSLVALHQAGYSLRQGECSLALVGGATVMATPQTFVEFSRQRGLSVDGRSKAFADAADGTGWAEGVGVLVVERLSDAQAKGHQVLAVVRGSAVNQDGASNGLTAPNGPSQQRVIRQALANAGLSSADVDVVEAHGTGTKLGDPIEAQAVIATYGQDRERPLLLGSLKSNIGHTQAAAGVSGVIKMVMALQHGVVPQTLHVDEPSRHVDWAAGAVELVTENQPWPVAERARRAGVSSFGISGTNAHVILESAPAEAASASEPVTPPSEASVPVVASDVVPLVVSAKTPGALTDIEERLRGYLAAASDVDMAAAASTLAATRSVFEHRAVLLGDDTITGIATPDPRVVFVFPGQGWQWLGMGSVLRETSPVFAGRMAECAAALGEFVDWDLFSVLDDPTVVDRVDVLQPACWAVMVSLAAVWQEAGVSPDAVIGHSQGEIAAACVAGAVSLRDAARIVALRSKLIGARLGHGAMASIALPAGDVALVDGAWIAAHNGPASTVIAGTPQAVDTVLAAHEAQGIRVRRITVDYASHSPQVEEIHAELLDATAAVGSQAPAVPWLSTVDGAWVEGPLDADYWYRNLREPVRFDQAVTLLQTQGETVFIEVSASPALTPAMNDDAITVATLRRDDDSPARILTALAEAFVQGVGVDWPAVTGATTSRVDLPTYPFQHQRYWAWLAGLAPEARGQALLKVVRESAAVVLGHTGADTVPVTAAFKDLGLDSLTAVELRNSLGRSTGLRLPVTAVFDYPTPAALAARLD

SEQ ID NO: 72 - protein, 923 aa, Streptomyces hygroscopicus
EPLAIVGMACRLPGGVASPEDLWRLVESGRDVISDFPVDRGWDLDNLYDPDPAVGKTYCKRGGFLDAAAEFDAAFFGISPREAAAMDPQQRLVLEASWEAFERAGIEPGSVRGSDTGVFMGAFANEYGAGADFGAFGMTAGAGSVLSGRVSYLFGLEGPAMTVDTACSSSLVALHQAGSALRQGECSLALVGGVTVMPTPQLFVGFARERGLAVDGRSKAFSDAADGAGWAEGVGVLVVERLSDAQARGHRVLAVVRGSAVNQDGASNGLTAPNGPSQQRVIRQALANAGLSSADVDVVEAHGTGTRLGDPIEAQAVIATYGQDRERPLLLGSLKSNIGHTQAAAGVSGVIKMVMALRHSVVPRTLHVDEPSRHVDWAAGAVELVTEKQPWPTSDRARRAGVSSFGISGTNAHVILESAPAQPLETDEALVPVVASDVMPLVVSAKTPDALTDIEDRLRAHLAAAPEADMQAVASTLAATRSVFEHRAVLLGDDTITGVAASGPRVVFVFPGQGWQWLGMGSVLRETSPVFAGRMAECAAALREFVDWDLFSVLDDPTVVDRVDVLQPACWAVMVSLAAVWQEAGVSPDAVIGHSQGEIAAACVAGAVSLQDAARIVALRSKLIAHLAGHGAMASIALPADAITLTDGAWIAAHNGTASTVIAGTPQAVDTVLATHEAQGIRVRRITVDYASHSPQVEEIHTELLDATATVGSQTPAVPWLSTVDNTWISRPLDTDYWYRNLREPVRFDQAVTLLQTQGETVFIEVSASPALTPAMNDDAVTVATLRRDDDSPTRILTALAEAFVQGVGVDWPAVTGATTTPVDLPTYPFQRQRYWTASWLAGLAPEARGQALLKVVRESTAVVLGHVDTETVPATAPFKDLGLDSLTAVQVRNGLAKATGLRLPATMVFDYPTPAALAARLD

SEQ ID NO: 73 - protein, 898 aa, Streptomyces hygroscopicus
EPLAIVGMACRLPGGVASPEDLWRLVESGTDAISDFPTDRGWDVEGLYDPDPDVPGKSYAVKGGFLDAAGFDAAFFGISPREALAMDPQQRLVLEASWEAFERAGIEPGSVRGSDIGVFMGAMANEYGAGADFGAFGMTAGAGSVLSGRVSYFFGLEGPAMTVDTACSSSLVALHQAGSALRQGECSMALVGGVTVMPTPQTFVEFARQRGLATDGRSKAFADAADGSGFSEGVGVLVVERLSDARARGHRVLAVVRGSAVNQDGASNGLSAPNGPSQQRVIRQALANAGLASADVDVVEAHGTGTRLGDPIEAQAVIETYGQDRERPLLLGSLKSNIGHTQAAAGVSAVIKMVMALRHGVVPQTLHVDEPSRHVDWTAGAVQLATEKQPWPASDRARRAGVSSFGISGTNAHVILESAPVHSVETDETAPMALASDVVPLVVSAKTSGALVDIEERLRGYLAAVPGVDLGAVASVLAGSRSVFGHRGVLVGGELVSGVALSGPRVVFVFSGQGSQCVGMGERLAGVFPVFAEVYGRVWDLLDVPGSGLGVDDTGFVQPALFALQVGLFGLLESWGVRPEVVVGHSVGEVAAGYVAGLWSLEDACVLVSARARLMQGLPGGGVMVSVSVSEDRARAALVEGVEIAAVNGPSSVVLSGDEAAVVGVAEGLGGRWRRLATSHAFHSARMDPMLDEFRVVAEGLEYREPRIVMAGGAGVVSPEYWVRQVRDTVRFGDQVAAYQGDAVFVEVGPGGSLARLIDGVAVGDGEDEVRAAVMAVAELFVRGVDVDWPAVVGTTATPVDLPTYPFQRQRYWAWLTGLASEDRRQALLKVVRDSAATVLGHADARAVEVDRAFRDLGVDSLTAVQVRNNLAKATGLRLPATMVFDYPTPAALAARLD

SEQ ID NO: 74 - protein, 898 aa, Streptomyces hygroscopicus
EPLAIVGMACRLPGGVASPEDLWRLVESGTDAISDFPTDRGWDVEGLYDPDPDVPGKSYAVKGGFLDAAGFDAAFFGISPREALAMDPQQRLVLEASWEAFERAGIEPGSVRGSDTGVFMGAFTNGYGTGADLDGFGATAGTGSVLSGRVSYFFGLEGPAMTVDTACSSSLVALHQAGYSLRQGECSMALVGGVTVMPTPQTFVEFARQRGLATDGRSKAFADAADGSGFSEGVGVLVVERLSDAQARGHRVLAVVRGSAVNQDGASNGLTAPNGPSQQRVIRQALANAGLASADVDVVEAHGTGTRLGDPIEAQAVIETYGQDRERPLLLGSLKSNIGHTQAAAGVSGVIKMVMALQHGVVPQTLHVDEPSRHVDWSAGAVELARERQPWPVAGRARRAGVSSFGISGTNAHVILESAPVHSVETDETAPMALASDVVPLVVSAKTSGALVDIEERLRGYLAAVPGVDLGAVASVLAGSRSVFGHRGVLVGGELVSGVALSGPRVVFVFSGQGSQCVGMGERLAGVFPVFAEVYGRVWDLLDVPGSGLGVDDTGFVQPALFALQVGLFGLLESWGVRPEVVVGHSVGEVAAGYVAGLWSLEDACVLVSARARLMQGLPGGGVMVSVSVSEERARAALVEGVEIAAVNGPSSVVLSGDEAAVVGVAEGLGGRWRRLATSHAFHSARMDPMLDEFRVVAEGLEYREPRIVMAGGAGVVSPEYWVRQVRDTVRFGDQVAAYQGDAVFVEVGPGGSLARLIDGVAVGDGEDEVRAAVMAVAELFVRGVDVDWPAVVGTTATPVDLPTYPFQRQRYWAWLTGLASEDRRQALLKVVRDSAATVLGHADARAVEVDRAFRDLGVDSLTAVQVRNNLAKATGLRLPATMVFDYPTPAALAARLD

SEQ ID NO: 75 - protein, 923 aa, Streptomyces hygroscopicus
EPLAIVGMACRLPGGVDSPEDLWRLVESGTDVISGFPTDRGWDLDNLYDPDPAVGKSYCVQGYFLDDVADFDASFFGISPREALAMDPQQRLILEASWEAFERAGIEPGSVRGSDTGVFMGAFSSGYGIGADHSGFGMTAGAGSVLSGRVSYLFGLEGPAMTVDTACSSSLVALHQAGSALRQGECSLALVGGATVMPTPQTFVEFARQRGLATDGRSKAFADAADGAGWAEGVGVLVVERLSDAQARGHRVLAVVRGSAVNQDGASNGLTAPNGPSQQRVIRQALANAGLSSADVDVVEAHGTGTRLGDPIEAQAVIETYGQDRERPLLLGSLKSNIGHTQAAAGVSAVIKMVMALRHGVVPQTLHVDEPSRHVDWTAGAVQLATEKQPWPASDRARRAGVSSFGISGTNAHVILESAPAQPLETDEPSAPIVASDVVPLVVSAKTLDALTDIEDRLRGYLAAASDVDMAAVASTLAATRSIFEHRAVLLGDDTITGIATPGPRVVFVFPGQGWQWLGMGSTLRETSPVFAARMAECAAALREFVDWDLFSILDDPTVVDRVDVLQPACWAVMVSLAAVWQEAGVSPDAVIGHSQGEIAAACVAGAVSLQDAARIVALRSKLIAHLAGHGAMASIALPADAITLTDGAWIAAHNGTASTVIAGTPQAVDTVLATHEAQGIRVRRITVDYASHSPQVEEIHTELLDATTTINPRTPAVPWLSTVDNTWISRPLDTDYWYRNLREPVRFDQAVTLLQTRGETVFIEVSASPALTPAMNDDAITVATLRRDDDSPARILTALAEAFVQGVGVDWPAVTGATTARVLDLPTYAFQHQRYWATAWLAGLAPAERGEALLKVVSDTVARVLGHADGRTIPATAAFKELGVDSLTAVELRNRLSAATGLRLPATMVFDYPSPGALAGWL

SEQ ID NO: 76 - protein, 930 aa, Streptomyces hygroscopicus
QPLAIVGMACRLPGGVASPEDLWRLVESGTDAISDFPVDRGWDLEGLYDPASDEPGVLYCDQGGFLDAAAGFDAAFFGISPREAAAMDPQQRLVLEASWEAFERAGIEPGSVRGSDTGVFMGAMANGYGAGADLGGFGATAGAGSVLSGRISYFFGLEGPAMTVDTACSSSLVALHQASFALRQGECSLALVGGVTVMPTPQTFVEFARQRGLAADGRSKAFSDAADGAGWAEGVGVLVVERLSDAQAKGHQVLAVVRGSAVNQDGASNGLTAPNGPSQQRVIRQALANAGLSSAEVDVVEAHGTGTRLGDPIEAQAVIATYGQDRERPLLLGSLKSNIGHAQAAAGVSGVIKMVMALRHGVVPQTLHVDEPSRHVDWAAGAVELVTENQPWPVAERARRAGVSSFGISGTNAHVILESAPAEAASASEPVTPPSEASVPVVASDVVPLVVSAKTPGALTDIEERLRGYLAAAPEADMQAVASTLAATRSVFEHRAVLLGDDTITGVAASGPRVVFVFPGQGWQWLGMGSVLRETSPVFAGQMAECAAALREFVDWDLFSVLDDPTVVDRVDVLQPACWAVMVSLAAVWQEAGVSPDAVIGHSQGEIAAACVAGAVSLRDAARIVALRSKLIGARLGHGAMASIALPAGAITLTDGAWIAAHNGPASTVIAGTPQAVDAVLAAYEAQGIRVRRITVDYASHSPQVEEIRAELLDATATVGSQAPVVPWLSTVDGAWVEGPLDADYWYRNLREPVRFDQAVTLLQTQGETVFIEVSASPALTPAMNDDAITVATLRRDDDSPARILTALAEAFVQGVGVDWPAATGATTSRVDLPTYPFQHQRYWTQTLSGLAAAERRQALAKLVRESAAVVLGHADPDSVPAAAAFKDLGVDSLTAVELRNSLGRSTGLRLPATMVFDYPTPDALAARLD

SEQ ID NO: 77 - protein, 930 aa, Streptomyces hygroscopicus
EPLAIVGMACRLPGGVDSPEDLWRLVESGTDAISGFPTDRGWDLDSLYDPILGASGEFYSAQGGFLDRAADFDASFFGISPREALAMDPQQRLVLEVSWEALERAGIEASSVRGSDTGVFMGAFSSGYGTGSDFGAFGATSSAGSVLSGRISYFFGLEGPAMTVDTACSSSLVALHQAGSALRQGECSLALVGGITVMSTPLTFAEFARQRGLAPDGRSKAFSDAADGAGFSEGVGVLVVERLSDAQAKGHRVLAVVRGSAVNQDGASNGLTAPNGPSQQRVIRQALANAGLASADVDVVEAHGTGTRLGDPIEAQAVIATYGQDRERPLLLGSLKSNIGHAQAAAGVSGVIKMVMALRHGVVPQTLHVDEPSRHVDWAAGAVELVTENQPWPVAERARRAGVSSFGISGTNAHVILESAPAEAASASEPVTPPSEASVPVVASDVVPLVVSAKTPGALTDIEERLRGYLAAASDVDMAVVASTLAATRSVFEHRAVLLGDDTITGVAASGPRVVFVFPGQGWQWLGMGSVLRETSPVFAGRMAECAAALREFVDWDLFSVLDDPTVVDRVDVLQPACWAVMVSLAAVWQEAGVSPDAVIGHSQGEIAAACVAGAVSLRDAARIVALRSKLIGARLGHGAMASIALPADAITLTDGAWIAAHNGPASTVIAGTPQAVDAVLAAYEAQGIRVRRITVDYASHSPQVEEIRAELLDATATVGSQAPVVPWLSTVDNTWISRPLDTDYWYRNLREPVRFDQAVTLLQTQGETVFIEVSASPALTPAMNDDAITVATLRRDDDSPARILTALAEAFVQGVGVDWPAVTGATTARVLDLPTYPFQRQRYWAWLTGLASEDRRQALLKVVRDSAATVLGHADARAVEVDRAFRDLGVDSLTAVQVRNNLAKATGLRLPATMVFDYPTPAALAARLD

SEQ ID NO: 78 - protein, 923 aa, Streptomyces hygroscopicus
EPLAIVGMACRLPGGVASPEDLWRLVESGTDVISGFPTDRGWDLDNLYDPDPAVGKSYCVQGYFLDDVADFDASFFGISPREALAMDPQQRLILEASWEAFERAGIEPGSVRGSDTGVFMGAFSSGYGIGADHSGFGMTAGAGSVLSGRISYLFGLEGPAMTVDTACSSSLVALHQASSALRQGECSLALVGGATVLATPYGFVEISRQRGLAADGRSKAFSDAADGMSFSEGAGVLVLERLSDAQAKGHRVLAVVRGSAVNQDGASNGLTAPNGPSQQRVIQQALANAGLASADVDVVEAHGTGTRLGDPIEAQAVIATYGQNRERPVLLGSLKSNIGHTHAAAGVSGVIKMVMALQHGVVPRTLHVDAPSRHVDWAAGAVELVTENQPWPVAERARRAGVSSFGISGTNAHVILESAPAQPLETGEPSAPIVASDVVPLVVSAKTPDALTDIEDRLRAHLAAAPEADMQAVASTLAATRSIFEHRAVLLGDDTITGIATPDPRVVFVFPGQGWQWLGMGSTLRETSPVFAARMAECATALREFVDWDLFSILDDPTVVDRVDVLQPACWAVMVSLAAVWQEAGVSPDAVIGHSQGEIAAACVAGAVSLQDAARIVALRSKLIAHLAGHGAMASIALPADAITLTDGAWIAAHNGPASTVIAGTPQAVDTVLATHEAQGIRVRRITVDYASHSPQVEEIRAELLDATATVGSQAPVVPWLSTVDGAWVEGPLDADYWYRNLREPVRFDQAVTLLQTQGETVFIEVSASPALTPAMNDDAVTVATLRRDDDSPTRILTALAEAFVQGVGVDWPAVTGATTTPVDLPTYPFQRQRYWTASDRLSGRTSGDQHRIMLELVLGHAASVLGHGAADAVAADKPFKDLGMDSLTAIELRNHLVAETGLRLPATTAFDHPTADDLARRL

SEQ ID NO: 79 - protein, 965 aa, Streptomyces hygroscopicus
EPIAIVSMACRAPGGVDSPDGLWRLVESGTDAISGFPTDRGWDVADLYSPDPAGYKSYCVQGGFLDTAADFDAAFFGISPREALGMDPQQRLLLEASWEAIERARIDPRSLRGRSVGVFVGGASQGYGAGADDQQQSNAITGGSISLLSGRVSYALGLEGPGVTVDTACSSSLVALHLASQALRQRECSLALVSGVSVMATPDVFVEFSRQRGLAPDGRCKSFSAAADGTGWSEGVGVLVLERLSEATRLGHRVHAVVRGSAVNSDGASNGLTAPNGASQQKVIRQALANAGLAASEVDAVEAHGTGTKLGDPIEAEAILATYGQDRAAPVWLGSLKSNIGHTMAASGVLGVIKMVESMRHGLLPRTLNVDEPSPHVDWASGDVALLTENQPWPADVGPRRAAVSSFGISGSNAHVVLEQYGEPAGPDLSDLTNTRAVNAADAPDRRQPVPLMLSARSQRALREQAGRLHAALAGAPDWRPLDIGYSLATTRSHFTHRAVAVGSGRELLRALSKLADGADWPALTTRIAKSRRVAFLFDGQGTQRLGMGSGLYAGFPVFAGVWDQVSAAFDKHLDHSLTDVFLGRDDRPAAAELVDDTLYAQAGLFTLEVALFRLLEEWGVRPDFLAGHSIGEAAAAYAGGMFSLEDVTALIVARGEALRLAPPGAMLALRASEEEVREFLGRTGAELDLAAVNGPASVVVSGASEAVADFRARWTAAGRKARELNVSRAFHSRHVEAGLGRFREVLESLTFGTPVLPIVSTVTGQLVDPVEMSTPEYWLRQVRQPVLFQDALRELSGQGVNTFVEIGPSGTLASAGLECLGGDASFHAVQQPRSPQDVGLMTAVAELHAGGTAVDWAKALAGGRATDLPVYPFQHESYWLAPADYAYPEEPGTMLELVRLEAAKVLGITEPDTILEETSFLDLGFDSLGTMRLRNRLSEVTELDLPATLLFDNPSPAELAAYLD

SEQ ID NO: 80 - protein, 908 aa, Streptomyces filamentosus
EPLAIVGMACRLPGGVSSPEDLWRLVESGTDAISHFPTDRGWDLDNLYDPDPDAPGKGYRVQGGFLDAAGFDAAFFGISPREAQAMDPQQRLVLEASWEAFERAGIDPGAMRGSHTGVFMGAMANGYGAGADLGGFGATAGAVSVLSGRVSYLFGLEGPAMTVDTACSSSLVALHQAAYSLRQGECSLALVGGVTVMPTPQMFVEFARQRGLAADGRSKAFADAADGAGFSEGVGVLVVERLSDAQAKGHRVLAVVRGSAVNQDGASNGLSAPNGPSQQRVIRQALANARLAPNEIDVVEAHGTGTTLGDPIEAQALIAAYGQDREQPVLLGSLKSNIGHTQAAAGVSGVIKMVMALQHGVVPRTLHVDSPSRHVDWTAGAVELVTENQPWPAIDRARRAGVSSFGISGTNAHVILESAPAQPVVETEEVPAPPVVASDMMPLVISAKTPSALVEFEGRLRAYLTSTPGVDMRAVASTLAGTRSVFEHRAVLLGDETVTGPGTGAGSGVAVSDPRVVFVFPGQGSQRAGMGEQLAAVFPVFAEIHQQVWDLLDVPDPGLDTDETGYAQPSLFALQVALFGLLESWGVRPQAVIGHSVGEIAAGYVAGLWSLRDACTLVSARARLMQTLPTGGAMVAVPVSEKQAQAALTDGVEIAAVNGPSSVVLTGDETAVLETAAALGRSTRLTTSHAFHSARMEPVLDEFRTVAETLDYRTPHIPMAAGDAVVTPEYWVRQIRDTVRFGDQVAAHENAVFVEIGPDRTLSRLTDGIAMLHGDNETQTAITALATLHTHGVNIHWPAVIGATTARVLDMPTYAFQHQRYWTTWLAGLAPEERKQALLKVVRDSAAAVLGHAGADTVPVTAAFKDLGLDSLTAVELRNSLGKSTGLRLPATMVFDYPNPTTLAARLD

SEQ ID NO: 81 - protein, 902 aa, Streptomyces filamentosus
EPLAIVGMACRLPGGVSSPEDLWRLVESGTDAISGFPTDRGWDIENLYDPDPDAPGKGYRVQGGFLDRAAEFDASFFGISPREAQAMDPQQRLVLETSWEAFERAGIEPGAMRGSDTGVFMGAMANGYGTGADLGAFGMTSAAVSVLSGRVSYLFGLEGPAMTVDTACSSSLVALHQAAYSLRQGECSLALVGGVTVMPTPQTFVEFARQRGLAADGRSKAFSDAADGAGFSEGVGVLVVERLSDARAKGHHVLAVVRGSAVNQDGASNGLSAPNGPSQQRVIRQALDNAGLSSTDVDVVEAHGTGTTLGDPIEAQALIAAYGQDREQPVLLGSLKSNIGHTQAAAGVSGVIKMVMALQHGVVPRTLHVDSPSRHVDWTAGAVELVTENQPWPAIDRARRAGVSSFGISGTNAHVILESAPDLPVVETEETPAPVVTSDMMPLVISAKTPAALADMEGRLRSYLTSMPGVDMRAVASTLAGTRSVFEHRAVLLGDETVTGPGTGVAVSGPRVVFVFPGQGSQRAGMGEQLAAVFPVFAEIHQQVWDLLDVPDPGLGADETGFAQPSLFALQVALFGLLESWGVRPQAVIGHSVGEIAAGYVAGLWSLRDACTLVSARARLMQTLPTGGAMVAVPVSEKQAQAALTDGVEIAAVNGPSSVVLTGDETAVLETAAALGKSTRLTTSHAFHSARMEPVLDQFRTVAETLDYRTPHIPMAAGDAVVTPEYWVRQIRDTVRFGDQVAAHENAVFVEIGPDRTLSRLTDGIAMLHGDNETQTAITALATLHTHGVNIHWPAVIGATTTPVDLPTYAFERQRYWAWLAGLAPEERKQALLKTVRDNAAKVLGHADARDIAVNTAFRDLGLDSLTAVQVRNSLAKATGLRLPTTTVFDYPNPTALATHLD

SEQ ID NO: 82 - protein, 901 aa, Streptomyces filamentosus
EPLAIVGMACRLPGGVSSPEDLWRLVESGTDAISDFPTDRGWDLDNLYDPDPDTPGKAHNVQGGFLDAAGFDASFFGISPREAQAMDPQQRLVLETSWEAFERAGIDPASVRGSDTGVFMGAFGSGYGTGADLGGFGATAGAVSVLSGRVSYLFGLEGPAMTVDTACSSSLVALHQASSALRQDECSLALVGGVTVMPTPQTFVEFARQRGLAADGRSKAFADAADGAGFSEGVGVLVVERLSDARAKGHRVLAVVRGSAVNQDGASNGLTAPNGPSQQRVIQSALDNAGLSSTDVDVVEAHGTGTTLGDPIEAQALIAAYGQDREQPVLLGSLKSNIGHTQAAAGVSGVIKMVMALQHGVVPRTLHVDEPSRHVDWTAGAVELVTENQPWPAIDRARRAGVSSFGISGTNAHVILESAPDLPVVETEEVPAPPVVASDLMPLVISAKTPSALADMEGRLRAYLTATPGVDMRAVASTLAGTRSVFEHRAVLLGDDTVTGPGVAVSGPRVVFVFPGQGSQRAGMGEQLAAVFPVFAEIHQQVWDLLDVPDPGLDTDETGFAQPSLFALQVALFGLLESWGVRPQAVIGHSVGEIAAGYVAGLWSLRDACTLVSARARLMQTLPTGGAMVAVPVSEKQAQAALTDGVEIAAVNGPSSVVLTGDETAVLETAAALGKSTRLTTSHAFHSARMEPVLDQFRTVAETLDYRTPHIPMAAGDAVVTPEYWVRQIRDTVRFGDQVAAHENAVFVEIGPDRTLSRLTDGIAMLHGDNETQTAITALATLHTHGVNIHWPTIVGTTTPVLDLPTYAFQHQRYWTSWLAGLAPEERKQALLKTVRDSAAAVLGHVGTDTVPATAAFKDLGLDSLTAVELRNSLGKSTGLRLPATMVFDYPNPTALAARLD

SEQ ID NO: 83 - protein, 930 aa, Streptomyces filamentosus
EPLAIVGMACRLPGGVSSPEDLWRLVESGTDAISGFPTDRGWDIENLYDPDPALGRTYTVQGGFLDIAGFDAAFFGISPREAQAMDPQQRLVLEASWEAFERAGIEPGSMRGSDTGVFMGAFSSGYGAEHEGFGATAGAVSVLSGRVSYFFGLEGPALTVDTACSSSLVALHQAGYSLRQGECSLALVGGVTVMPTPQTFVEFSRQRGMAVDGRSKAFADAADGAGWAEGVGVLVVERLSDARAKGHRVLAVVRGSAVNQDGASNGLSAPNGPSQQRVIRQALANAGLSSADVDVVEAHGTGTRLGDPIEAQAVLATYGQDREQPLLLGSLKSNIGHAQAAAGVSGVIKMVMALQHGVVPRTLHVDSPSRHVDWTAGSVELVTENQPWPVLERARRVGVSSFGISGTNAHVILESAPDPDVAVVEVEETPAPPVVVISAKTPSALADMEGRLRAYLAARPGVDVRAVASTLAGTRSVFEHRAVLLGDDTVTGTSTGTGSGAAVSGVAVSGPRVVFVFPGQGWQWLGMGCGLRETSAVFAGRLAECAAALSEFVDWDLLTVLDDPSVVDRVDVLQPACWAVMVSLAAVWQEAGVVPDAVIGHSQGEIAAACVAGALTLRDAARIVALRSRLIARLAGQGAMASIALPAHEIVLGDGAVVAARNGPAATVVAGTARAVERVLAVHEKEGARVRRITVDYASHSPQVEEIRTELLDILATTGSRTPVVPWLSTVDGTWTEQPLDPDYWYRNLREPVGFHPAVDTLRSMGETVFIEISASPTLTPAMDDATTVATLRRDNDTPQQILTALAEAHTHGVNIHWPAIIGTTTTPARVDLPTYAFQHQRYWTSWLAGLAPEERKQALLKMVRDSAAAVLGHAGADTVPVTAAFKDLGLDSLTAVELRNSLGKSTGLRLPVTMVFDYPNPTTLAARLD

SEQ ID NO: 84 - protein, 931 aa, Streptomyces filamentosus
EPLAIVGMACRLPGGVSSPEDLWRLVESGTDAISGFPTDRGWDIENLYDPDPDAAGTTYTVQGGFLDIAGFDASFFGISPREALAMDPQQRLVLETSWEAFERAGIEPSSMRGSDTGVFMGAFTNGYGAGVDFGAFGGASAAVSVLSGRVSYFFGLEGPAITVDTACSSSLVALHQAGSALRQGECSLALVGGVTVMPTPQLFVDFSRQRGLAADGRSKAFADPADGAGFSEGVGVLVVERLSDAQAKGHRVLAVVRGSAVNQDGASNGLSAPNGPSQQRVIRQALDNARLAPNEIDAVEAHGTGTTLGDPIEAQALIATYGQDREQPVLLGSLKSNIGHTQAAAGVSGVIKMVMALQHGVVPRTLHVDSPSRHVDWTAGAVELVTENQPWPAIDRARRAGVSSFGISGTNAHVILESAPDPDVPVVETEETPPPPVVVISAKTPSALADMEGRLRAYLAATPGVDVRAVASTLAGTRSVFEHRAVLLGDDTVTGTSTGTGSGAAVSGVVVSGPRVVFVFPGQGWQWLGMGCGLRETSAVFAGRLAECAAALSEFVDWDLLTVLDDPSVVDRVDVLQPACWAVMVSLAAVWQEAGVVPDAVIGHSQGEIAAACVAGALTLRDAARIVALRSRLIARLAGQGAMASIALPAHEIALGDGAVVAARNGRAATVIAGTARAVDRVLAVHEKEGARVRRITVDYASHSPQVEEIRTELLDILATTGSRTPVVPWLSTVDGTWTEQPLDPDYWYRNLREPVGFHPAVDTLRSMGETVFIEISASPTLTPAMDDATTVATLRRDNDTPQQILTALAEAHTHGVNIHWPAIMGATTTRVDLPTYAFQHQRYWTSWLAGLAPEERKQALLKVVRDSAAKVLGHAGADTVPVTAAFKDLGLDSLTAVELRNSLGKSTGLRLPATMVFDYPNPTTLAARLD

SEQ ID NO: 85 - protein, 910 aa, Streptomyces filamentosus
EPLAIVGMACRLPGGVSSPEDLWRLVESGTDAISGFPTDRGWDIENLYDPDPDAPGKGYRVQGGFLDRAAEFDASFFGISPREAQAMDPQQRLVLETSWEAFERAGIEPGAMRGSDTGVFMGAMANGYGTGADLGAFGMTSAAVSVLSGRVSYLFGLEGPAMTVDTACSSSLVALHQAAYSLRQGECSLALVGGVTVMPTPQTFVEFARQRGLAADGRSKAFSDAADGAGFSEGVGVLVVERLSDARAKGHHVLAVVRGSAVNQDGASNGLSAPNGPSQQRVIRQALDNAGLSSTDVDVVEAHGTGTTLGDPIEAQALIATYGQDREQPVLLGSLKSNIGHTQAAAGVSGVIKMVMALQHGVVPRTLHVDSPSRHVDWTAGAVELVTENQPWPAIDRARRVGVSSFGISGTNAHVILESAPAQPVVETEEVPAPPVVASDMMPLVISAKTPSALVEFEGRLRAYLTSTPGVDMRAVASTLAGTRSVFEHRAVLLGDDTVTGPDTGTGAGSGVAVSDPRVVFVFPGQGSQRAGMGEQLAAVFPVFAEIHQQVWDLLDVPDPGLGADETGFAQPSLFALQVALFGLLESWGVRPQAVIGHSVGEIAAGYVAGLWSLRDACTLVSARARLMQTLPTGGAMVAVPVSEKQAQAALTDGVEIAAVNGPSSVVLTGDETAVLETAAALGKSTRLTTSHAFHSARMEPVLDQFRTVAETLDYRTPHIPMAAGDAVVTPEYWVRQIRDTVRFGDQVAAHENAVFVEIGPDRTLSRLTDGIAMLHGDNETQTAITALATLHTHGVNIHWPAVIGATTARVLDLPTYAFERQRYWAWLAGLAPEERKQALLKVVRDSAAAVLGHADARDIAVNTAFRDLGLDSLTAVQVRNSLAKATGLRLPTTTVFDYPNPTALATHLD

SEQ ID NO: 86 - protein, 910 aa, Streptomyces filamentosus
EPLAIVGMACRLPGGVSSPEDLWRLVESGTDAISDFPTDRGWDLDNLYDPDPDTPGKAHNVQGGFLDAAGFDAAFFGISPREALAMDPQQRLVLETSWEAFERAGIDPASVRGSDTGVFMGAFGSGYGTGADLGGFGATAGAVSVLSGRVSYLFGLEGPAMTVDTACSSSLVALHQASSALRQDECSLALVGGVTVMPTPQTFVEFARQRGLAADGRSKAFADAADGAGFSEGVGVLVVERLSDARAKGHRVLAVVRGSAVNQDGASNGLTAPNGPSQQRVIRQALDNAGLSSTDVDVVEAHGTGTRLGDPIEAQALIATYGQDREQPVLLGSLKSNIGHTQAAAGVSGVIKMVMALQHGVVPRTLHVDSPSRHVDWTAGAVELVTENQPWPAIDRARRVGVSSFGISGTNAHVILESAPAQPVVETEEVPAPPVVASDMMPLVISAKTPSALVEFEGRLRAYLTSTPGVDMRAVASTLAGTRSVFEHRAVLLGDDTVTGPDTGTGAGSGVAVSDPRVVFVFPGQGSQRAGMGEQLAAVFPVFAEIHQQVWDLLDVPDPGLDTDETGYAQPSLFALQVALFGLLESWGVRPQAVIGHSVGEIAAGYVAGLWSLRDACTLVSARARLMQTLPTGGAMVAVPVSEKQAQAALTDGVEIAAVNGPSSVVLTGDETAVLETAAALGRSTRLTTSHAFHSARMEPVLDEFRTVAETLDYRTPHIPMAAGDAVVTPEYWVRQIRDTVRFGDQVAAHENAVFVEIGPDRTLSRLTDGIAMLHGDNETQTAITALATLHTHGVNIHWPAVIGATTARVLDMPTYAFQHQRYWTTWLAGLTPEERKQALLKTVRDSAAAVLGHADARDIAVNTAFRDLGLDSLTAVQVRNSLAKATGLRLPTTTVFDYPNPTALATHLD

SEQ ID NO: 87 - protein, 938 aa, Streptomyces filamentosus
EPLAIVGMACRLPGGVSSPEDLWQLVESGTDAISHFPTDRGWDIDNLYDPDPDTPGKTYCVQGYFLDGIAEFDASFFGTSPREALAMDPQQRLVLETSWEAFERAGIDPASVRGSDTGVFMGAFSSGYGTGADLGGFGATAGAGSVLSGRVSYLFGLEGPAMTVDTACSSSLVALHQAGYSLRQGECSLALVGGVTVMPTPQAFVEFSRQRGLAADGRSKAFADAADGAGWAEGVGVLVVERLSDARAKGHRVLAVVRGSAVNQDGASNGLTAPNGPSQQRVIRSALDNARLAPNEIDVVEAHGTGTRLGDPIEAQALIAAYGQDREQPVLLGSLKSNIGHTQAAAGVSGVIKMVMALQHGVVPRTLHVDEPSRHVDWTAGAVELVTENQPWPAIDRARRAGVSSFGISGTNAHVILESPPAQPVVETEEVPAPPVVASDMMPLVISAKTPSALADMEGRLRAYLAARPGVDVRAVASTLAGTRSVFEHRAVLLGDDTVTGTSTGTGSGAAVSGVVVSGPRVVFVFPGQGWQWLGMGCGLRETSAVFAGRLAECAAALSEFVDWDLLTVLDDPSVVDRVDVLQPACWAVMVSLAAVWQEAGVVPDAVIGHSQGEIAAACVAGALTLRDAARIVALRSRLIARLAGQGAMASIALPAHEIALGDGAVVAARNGPAATVIAGTPRAVDRVLAVHEKEGARVRRITVDYASHSPQVEEIRTELLDILATTGSRTPVVPWLSTVDGTWTEQPLDPDYWYRNLREPVGFHPAVDTLRSMGETVFIEISASPTLTPAMDDATTVATLRRDNDTPRQILTALAEAHTHGVNIHWPTVIGTTTTPARVDLPTYAFQHQRYWTSWLAGLAPAERDEALLKMVRDSAALVLGHAGGRTIPVAAAFKDLGVDSLTAVELRNRLSAATGLRLPATLVFDYPNPAALAGWL

SEQ ID NO: 88 - protein, 931 aa, Streptomyces filamentosus
QPLAIVGMACRLPGGVSSPEDLWRLVESGTDAISDFPTDRGWDIENLYDPDSPGEGEAYSAQGGFLDAAGFDAAFFGISPREAQAMDPQQRLVLEASWEAFERAGIDPGAMRGSHTGVFMGAMANGYGAGADLGGFGATAGAGSVLSGRISYLFGLEGPAMTVDTACSSSLVALHQAAYSLRQGECSLALVGGVTVMATTQTFVEFARQRGLAADGRSKAFADAADGAGWAEGVGVLVVERLSDARAKGHRVLAVVRGSAVNQDGASNGLTAPNGPSQQRVIRSALDNAGLSSADVDVVEAHGTGTTLGDPIEAQALIAAYGQDREQPVLLGSLKSNIGHAQAAAGVSGVIKMVMALQHGVVPRTLHVDSPSRHVDWTAGAVELVTENQPWPVTERARRAGVSSFGISGTNAHVILESAPDPDVPVVETEKVPAPPVVVISAKTPSALVEFEGRLRAYLAARPGVDVRAVASTLAGTRSVFGHRAVLLGDDTVTGTSTGTGSGAAVSGVVVSGPRVVFVFPGQGWQWLGMGCGLRETSAVFAGRLAECAAALSEFVDWDLLTVLDDPSVVDRVDVLQPACWAVMVSLAAVWQEAGVVPDAVIGHSQGEIAAACVAGALTLRDAARIVALRSRLIARLAGQGAMASIALPAHEIALGDGAVVAALNGPAATVIAGTPRAVDRVLAVHEKEGARVRRITVDYASHSPQVEEIRTELLDILATTGSRTPVVPWLSTVDGTWTEQPLDPDYWYRNLREPVGFHPAVDTLRSMGETVFIEISASPTLTPAMDDATTVATLRRDNDTPQQILTALAEAHTHGVNIHWPTVMGATTTRVDLPTYAFQHQRYWTSWLAGLAPEERKQALLKVVRDSAAAVLGHAGTDTVPVTAAFKDLGLDSLTAVELRNSLGKSTGLRLPATLVFDYPNPTTLAARLD

SEQ ID NO: 89 - protein, 929 aa, Streptomyces filamentosus
EPLAIVGMACRLPGGVSSPEDLWRLVESGTDAISGFPTDRGWDIENLYDPDPDAPGTGYRVQGGFLDRAAEFDASFFGISPREALAMDPQQRLVLETSWEAFERAGIEPGSVRGSDTGVFMGAFSSGYGTGADFGAFGATSAAVSVLSGRVSYFFGLEGPAMTVDTACSSSLVALHQAGSALRQGECSLALVGGVTVMSTPLTFAEFARQRGLAADGRSKAFADAADGAGFSEGVGVLVVERLSDARAKGHRVLAVVRGSAVNQDGASNGLSAPNGPSQQRVIRQALANAGLSSADVDVVEAHGTGTRLGDPIEAQAVLATYGQDREQPLLLGSLKSNIGHTQAAAGVSGVIKMVMALQHGVVPRTLHVDSPSRHVDWTAGAVELVTENQPWPVLERARRAGVSSFGISGTNAHVILESAPDPDLPVVEVEETPAPVVAVISAKTPSALVEFEGRLRTYLTARPGVDVRAVASTLAGTRSVFGHRAVLLGDDTVTGTGPGAAVSGVVVSGPRVVFVFPGQGWQWLGMGCGLRETSAVFAGRLAECAAALSEFVDWDLLTVLDDPSVVDRVDVLQPACWAVMVSLAAVWQEAGVVPDAVIGHSQGEIAAACVAGALTLRDAARIVALRSRLIARLAGQGAMASIALPAHEIALGDGAVVAARNGPAATVIAGTPRAVDRVLAVHEKQGARVRRITVDYASHSPQVEEIRTELLDILATTGSRTPVVPWLSTVDGTWTEQPLDPDYWYRNLREPVGFHPAVDTLRSMGETVFIEISASPTLTPAMDDATTVATLRRDNDTPQQILTALAEAHTHGVNIHWPTVMGATTTPVRVDLPTYAFERQRYWAWLAGLTPEERKQALLKTVRDSAAAVLGHTDARDIAMNTAFRDLGLDSLTAVQVRNSLAKATGLRLPTTTVFDYPNPTALATHLD

SEQ ID NO: 90 - protein, 939 aa, Streptomyces filamentosus
EPLAIVGMACRLPGGVSSPEDLWQLVESGTDAISHFPTDRGWDIDNLYDPDPDTPGKTYCVQGYFLDGIAEFDASFFGISPREAQAMDPQQRLVLETSWEAFERAGIDPASVRGSDTGVFMGAFGSGYGTGADLGGFGMTAGAGSVLSGRVSYFFGLEGPAMTVDTACSSSLVALHQASSALRQGECSLALVGGTTVLATPYGLVEISRQRGLAADGRSKAFSDAADGMGFSEGVGVLVVERLSDARAKGHRVLAVVRGSAVNQDGASNGLTAPNGPSQQRVIRSALDNAGLSSADVDVVEAHGTGTRLGDPIEAQAVLATYGQDREQPLLLGSLKSNIGHTHAAAGVSGVIKMVMALQHGVVPRTLHVDEPSRHVDWTAGAVELVTENQPWPAIDRARRAGVSSFGISGTNAHVILESPPAQPVVEVEETPAPPVVASDMMPLVISAKTPSALADMEGRLRAYLAARPGVDVRAVASTLAGTRSVFEHRAVLLGDDTVTGTSTGTGSGAAVSGVVVSGPRVVFVFPGQGWQWLGMGCGLRETSAVFAGRLAECAAALSEFVDWDLLTVLDDPSVVDRVDVLQPACWAVMVSLAAVWQEAGVVPDAVIGHSQGEIAAACVAGALTLRDAARIVALRSRLIARLAGQGAMASIALPAHEIALGDGAVVAARNGRAATVIAGTARAVDRVLAVHEKEGARVRRIAVDYASHSPQVEEIRTELLDILATTGSRTPVVPWLSTVDGTWTEQPLDPDYWYRNLREPVGFHPAVDTLRSMGETVFIEISASPTLTPAMDDATTVATLRRDNDTPRQILTALAEAHTHGVNIHWPTVIGTTTTPARVDLPTYAFQHQRYWTSDRLNGRTGLEQHRVMLELVLGHAASVLGHSAPDAIAADRPFKDLGMDSLTAIELRNHLVAETGLRLPATTAFDHPTADDLAKRL

SEQ ID NO: 91 - protein, 962 aa, Streptomyces filamentosus
EPIAIVSMACRVPGGVDSPEGLWHLVESGTDAISDFPTNRGWDVANLYSPDPAGYTSYCVQGGFLDSAADFDATFFGISPREALGMDPQQRLVLEASWEAIERAQIDPRSLRGSNVGVFVGGASQGYGASANEQQQSNAITGGSSSLLSGRVTYALGLEGPAVTVDTACSSSLVALHLASQSLRQRECSLALVSGVSVMATPDVFVEFSRQRGLAPDGRCKSFSASADGTGWSEGVGVLVLERLSEATRLGHRVLAVVRGSAVNSDGASNGLTAPNGASQQRVIRQALANAGLTASQVDAVEAHGTGTTLGDPIEAEALLATYGQDRSTPAWLGSLKSNIGHTMAASGVLGVIKMVEAMRHGLLPRTLHVDEPSPHVDWASGDIALLSESRPWPDGSTPRRAGVSSFGISGTNAHVVLEQYRDPAGPDTPTGSDTQTGPETTTEHGPLPLMLSARSPKALREQAGRLHAALVEAPRWRPLDIGYSLATTRSSFAHRAVAVGSDRELLRALSQLADGGTSPALVTATAKAGRVAFLFDGQGTQRLGMGSGLYERFPAFARTWDLVSAAFDKHLNHSLTDVFLGRSGSVTAELVDDTLYAQAGIFTMEVALFELLDEWGIRPDFLTGHSIGEAAAAYGAGMLSLEDVTTLIVARGQALRLSPPGAMVALRASEEEVREFLDRTGAALDLAAVNSPTSVVVSGAPDAVSDFRTAWTESGREARALNVRHAFHSRHVEAGLGRFREVLDSLTFRAPVLPVVSTVTGRLVEPAEMSTPEYWLRQVRQTVRFHDALRELSGRGVGTFVEIGPSGTLASAGLECLGGDAAFHAVQRPRSAEDVCLMTAVAELHAGGTAVDWTKVLAGGRRTDLPVYPFQHEAYWLTPAEPSYAEEPLTTLELVCSEAANVLGITEPGILLEDSSFLDLGLDSLGAMRLRNRLSELTELDLPATLLFDNPNPTDLAAYLD

SEQ ID NO: 92 - protein, 889 aa, Micromonospora sp.
EPLAIVGMAARFPGGVASADDLWRLVVSGGDAIGGFPTDRGWDLDELYDPDPAATGRSYVREGGFLSDATTFDASFFRIGPREAKAMDPQQRLLLETSWEAFEHAGIRPETLRGTATAVFAGISLQDYGVLAGSDPELEGYAGTGNAPSVLSGRLSYFYGLEGPAVTIDTACSSSLVALHLAGQSLRRDECTLAVVGGVTVMPSPNVFVEFSRQRGLAPDGRCKPFAAAADGTGWSEGAGVLVVERLSDARRNNRRILAVVRGSAVNQDGASSGLTAPHGPSQQRVIRAALAAAGLTAGDVDVVEAHGTGTTLGDPIEAQGVLATYGDRKGAPVRLGSVKSNLGHTQAAAGVAGVIKMVQALRHGVMPRSLHIDEPSPHVDWTAGRVELLTSNLPWPASERPRRAAVSSFGISGTNAHVILEQAFPATEPEPPFTPVVSGPELPLIFSAKDPDALAAQTRVTDGPGVAYALATSRSMFDHRTVRLGDMTVTGIAVTDPEVVFVFPGQGTQWAGMGRDLMEASPVFAERMNECAAALEPYLDLWAAIDAPDHVETLQPASWAMMVSLAAVWQAAGVQPAAVIGHSQGEIAAACVSGAISLQDAAAVVALRSKAIAASLGKGAMASIPLPADAIELTGEVWVAALNGPSSTVVAGVPEAVELVRARYEGRRIAVDYASHTPHVEALRGQVVSVPSQAPVIPWFSTVDSGWVEGPLDDDYWFRNLRQPVQFGPAAAGFDNAVFIEVSARPVLIPALEASVTVPSLRRDDGGPERMLASLAQAFVAGVPVDWTTIVAPAPFVELPTYPFQGERYWIDPRTLDEVLAVVRDSAATVLGHTDPTAITPDRSFKDLGFDSLAAVQLRNHLLTATGVRLSATAVFDFPTPVVLAGEV

SEQ ID NO: 93 - protein, 856 aa, Micromonospora sp.
EPIAVVGMACRLPGDVSSPEDLWRLVSEGRDAVGPFPADRGWEPGDAAYARVGGFVTGATGFDAGFFGISPREAQAMDPQQRLLLEVAWEAFERAGIAPDELRGSDTGVFVGTYGQGYGELAVDGDAEGYVGIGNSGSVVSGRVSYFFGLEGPAVTVDTACSSSLVALHQAAQALRQGECSLALVGGVTVMSSPLIFQEFARQGGLAADGRCKAFADGADGTGWGEGVGVLVVERLSEAQRRGHTVLAVVRGSAVNQDGASNGLTAPNGPSQQRVIRAALASAGLGVGDVDLVEAHGTGTALGDPIEAQALLATYGSDGSPVWLGSLKSNIGHTQAAAGVAGVIKAVEAMRHGVMPRTLHVDQPSSHVDWSAGAVELLTANRPWDSGGRPRRAAVSSFGISGTNAHVILEESPSAPVPPEPGTAPLLLSARSPAALAQFESRTAGLRPSRDLASTLSRRALFDHRAVVLPDGDTVRGGVGDAPLVFVFAGQGSQRADMGSRLAEEFPVFAAAYERVWSLLDVDESLEVDHTGFAQPALFAFEVALAELLGVRPDAVIGHSVGELAAAYVAGAMSLEDACRLVSARARLMQALPSGGVMVSVRVSEEAARTVLRDGVEIAAVNGPQAVVLSGDEDAVLAAAAELGEFKRLRTSHAFHSARMEPMLEEFRAVASTVAFDEPQIALSFVPSAEYFVRQVRETVRFGEQVAAFAPGTLFVEVGPDGSLSRLTGGVSAAEPMKALAYLWVRGVGVDWTPYIGDGRLDDAPTYPFQPERYWPEQRRRARHGDFLALVTATAAVVLGHPEGTDIPADTPFQSLGLDSLSAVDLRNQLAQATGVRLSPTAVFDYPTPRALAERL

SEQ ID NO: 94 - protein, 899 aa, Micromonospora sp.
DPIAIVGMACRYPGGVATADDLWDLVAEGGDAVGPFPVDRGWDLAALYDPDPEAAGKSYVREGGFLGGAADFDAAFFGISPREALAMDPQQRLLLETAWEAFEHAGIDPLDLRRSDTGVFVGTMAQEYGGLVTDSAHGLEGWIGTGNSQSVMSGRLSYFFGLQGPAVTVDTACSSSLVALHQAAQALRNGECALAVVGGVTVMSSPRTFQEFSRQRGMAPDGRCKPFAAAADGTGWSEGVGVLVVERLSEARRNGHAVLAVVRGTAVNQDGTSNGLTAPNGPAQQQVIRAALERAGLGVGDVDVVEAHGTGTALGDPIEAQAILDTYGSRTGGEPVRLGSVKSNLGHTQAAAGVAGVIKMVQAMRHATMPRSLHIDEPSPHVDWASGAVELLTAERGWPATDRPRRAAVSSFGISGTNAHVIVEGVADPELSREASPGGPLPFVLSAPTAEALSAQETRLRRFRVERPDVDERDIAITLAGRTGFAHRTVLIGDLTVSGVAVADRRVVFVFPGQGTQWAGMGRDLMAASPVFAERMNECAAALEPYLDLWEAIDSPDRVETLQPASWAVMVSLAAVWQAAGVQPAAVIGHSQGEIAAACVSGAISLQDAAAVVALRSKAIGASLGKGAMASIPLPADAIELIDEVWIAALNGPSSTVVAGAPEAVEQIRARYDGRRIAVDYASHTPHVEALRGQVVSVPSRAPAIPWFSTVDSAWVEDPLDEDYWFRNLRQPVQFGPAAAGFDNAVFIEVSARPVLIPALEDAVTVPTLRRDDGGIDRLHASVAQAWTAGADVDWAALLPAGGRRIALPPYAFTHERFWPRRPTAAGQDLLTVVRTAAATVLGHRDAARVPADRAFKELGFDSLSAVQLRNELLTATGVRLSATAVFDHPTAAALAEAL

SEQ ID NO: 95 - protein, 872 aa, Micromonospora sp.
EPIAIVGMACRLPGDVSSPDELWELVEAGRDAVGPFPADRGWNLSTLFDPDPDAPGKSYVREGGFLTGAGLFDADFFGISPREALAMDPQQRLLLEMAWEAFERAGIAPDELRGSDTGVYVGTYAQGYGELAAATAGEGFVGIGNSGSVVSGRVSYFLGLEGPAVTVDTACSSSLVALHQAAQALRLGECSMALVGGVTVMASPLMFQEFSRQRGLSPDGRCKAFAESADGTGWGEGVGVLVVERLSEARRRGHTVLAVVRGSAVNQDGASNGLTAPNGPSQQRVIRAALASAGLTVGDVDLVEGHGTGTALGDPIEAQALLATYGSAGSPVWLGSLKSNIGHTQAAAGVAGVIKMVQAMRHGVMPRTLHVDQPSSHVDWSAGAVELLTANRPWDSGGRPRRAAVSSFGISGTNAHVILEGVPAPEPAAGDAETAPLVLSARTAPALTDLEARVSARPSSPDLAATLAGRASFDHRAVVLPDGEVVRGRAGAAPVVLVFAGQGSQRADMASRLAGEFPVFAAAYERVWSLLDVDEALDTDQTGFAQPALFAYEVALAELLNVRPDAVIGHSIGELAAAYTSGSLSLEDACRLVSARARLMQALPPGGAMVSVRVSEEVAREVLRDGVEIAAVNGPQAVVLSGDEDAVLAAAAKLGEFKRLRTSHAFHSARMEPMLEEFRAVALTVEFREPEVALSFVPSAEYFVGQVRETVRFGEQVASFEPGTLFVEVGPDGSLSRLTGGVSAAEPLTALAYLWVHGVAIDWVPYLGGGRLDLGAPTYPFQHERYWPARALAQLPPARRGRALLDLVQNRVAKTLGLVRPADPGRAFTDLGFTSLTALELRNSIAEETGLPMPASLVFDHPNARSLAGYLD

SEQ ID NO: 96 - protein, 896 aa, Micromonospora sp.
EPLAIVGMACRLPGGISSAEELWRLVAEGGDAIGPFPGDRGWDVDALYDPDPAAGHTYTRSGGFLPGATDFDAAFFGISPREAQAMDPQHRQLLETSWEALEHAGIDPAGLRGRDVGVFAGFSGQDYIAEMGVGPAEAGGYQVTGRAASVLSGRLSYFYGLEGPAVTVDTACSSSLVALHLAGQSLRDGESSLALVGGVTVMSSPGLFVEFSRQRGLAPDGRCKAFSADADGTGWSEGVGVLVVERLSDARRNGHRILAVVRGSAVNQDGASNGLTAPNGPSQQRVIRQALAQSGLSVADVDVVEAHGTGTALGDPIEAQAVLATYGGRAGGEPVRLGSLKSNIGHTQAAAGIASLIKMVQAIRYGVMPRTLHVSEPSPLVDWASGRVELLTSDIPWPDGVRRAAVSAFGISGTNAHVILEEAPAPAAVPSIRPVVSGPALPLVFSARDPSALAAQTRVTDGPGVAYALATSRTMLDHRTVRLNDVTVTGIAVTDPEVVFVFPGQGSQWAGMGRDLMGSSPVFAERMNECAAALEPYLDLWAAIDAPDRVETLQPASWAVMVSLAAVWQAAGVQPAAVIGHSQGEIAAACVSGAISLQDAAAVVALRSRAIAASLGKGAMASIPLPADAIELADEVWVAALNGPSSTVVAGALEAVEQVRARYEGRRIAVDYASHTPHVEALRGQVVSVPSQAPAIPWFSTVDSGWIEGPLDDDYWFRNLRQQVQFGPAAAGFDNAVFIEVSARPVLIPALDASVTVPSLRRDDGGPERMLASLAQAFVAGVPVDWTTIVPPAPHVELPSYPFQRQRHWIDMERLGQLPPGDRDRFLLDLVRDAAAAVLGHGSRETVPASAAFKELGFDSLIAVQLRNAVSAATGVRLPATVTFDHPTPQALAALL

SEQ ID NO: 97 - protein, 919 aa, Micromonospora sp.
EPLAIVGMACKFPGGVDSPERLWEMLEAGEDVIGPFPDDRGWDVDGGYDPDPEKAGSWYARAGGFLAGAADFDAAFFGINPREALAMDPQQRLLLEVAWEAFERSGIAPDSLRGTDTGVFVGTFGQGYGRLVSAGAPGLEAYSGTGNTGSVASGRLSYVFGLEGPAVTVDTACSSSLVALHQASQSLHRGECSLALVAGVTVMSTPDSFVEFSRQRGLSPDGRCKAFAAAADGTGFSEGAGVLVVERLSDAQRNGHQILAVVRGSAVNQDGASNGLTAPHGPSQQRVINTALTDADLTTTDIDLVEAHGTGTTLGDPIEAQAILATYGNRTTGNPVHLGSVKSNLGHTQAAAGVAGVIKVIQAMRHATMPKSLHIDQPSPHVDWTAGRVELLTGNRPWPATDRPRRAAVSSFGVSGTNAHVILEERAAAEEQPPAVDGPVPLVLSARTPEALTAQEEAVRGLSTDDRHRVAPALALGRAALPHRAVLLGDSVIRGTASADDGRPVFLFPGQGAQWAGMGRELMAASPVFAERMRECAVALAGFVDWDLFAVLDDAEALRRTEIVQPASWAVMVSLAALWESWGVHPAAVVGHSQGETAAAVVAGAIGLRDGARLSATRSRVLALLAGHGALASIALPAAEVEVVDGVSVAAVNGPRATLISGDPAGVEAVTARYEASGVRVRRIPADVASHSPHVERAEETLLTALAGIEARVPGVPWLSTATGDWITEPVDERYWYRNLRSPVLFHPAITTLRDRGHRLFLEISTHPQLLPAMEDDLLTVGSLRRDDGGPDRMHTALAEAWAGGADVDWPAVLGAGPVRALDLPTYPFQRRRFWPEAALPPVERDRALVEIVRDQAAAVLGHPDAGALTPGTAFRDLGFDSLTAVQLRNHLATATGLTLPATVIFDHPTPRALATFLD

SEQ ID NO: 98 - protein, 883 aa, Micromonospora sp.
EPLAVVGMACRLPGGVASPDQLWDLVVSGGDGIGPFPADRGWPTDDIFDPDPDAPGKTYVREGGFLDGAGEFDAAFFGISPREALAMDPQQRLLLETSWEAFEHAGIDPAGLRGGDTGVFVGGFTQAYGVGTADLEGYAATGTVGSVLSGRLSYFYGFEGPAVTVDTACSSSLVALHQAGQALRQGECTLAVVGGVTVMPTPVVFQEFSRQRGLATDGRCKAFADEADGTGFAEGAGVLLVCRLSDARRDGRRILAVVRGSAVNQDGASNGLTAPHGPSQQRVIRAALANARLGPGDVDLIEGHGTGTTLGDPIEAQALLATHGSGASPVRLGSLKSNIGHTQAAAGVAGVIKVIQALRNGLMPRTLHAGTPSSRVDWSAGNVELLTSNLPWPAADRPRRAAVSSFGISGTNAHVILEEAPAAAAVPTISPVVSGPALPLVFSARDPSALAAQTRVTEGPGVAFALATTRSMFEHRAVRIGDFSVSGAAVADRRVVFVFPGQGTQWAGMGRDLMSASPVFAERMNECAAALEPYLDLWEAIDSPDRVETLQPASWAVMVSLAAVWQAAGVQPAAVIGHSQGEIAAACVAGSITLQDAAAVVALRSRAIAASLGKGAMASIPLPAEQIELAGEVWVAALNGPSSTVVAGLPEAVEQVRARYEGRRIAVDYASHTPHVEALRGQVVSVPSRAPAIPWFSTVDSGWIEGPLDEDYWFRNLRQPVQFGPAAGRFDDAVFIEVSARPVLIPALEDAATVPSLRRDDGGGDRMLASLAQAFVAGVPVDWTTIIPPAPFVELPSYPFQHRRYWIDSSEDALRDLVREQAAAVLGYPDPSRITPGVAFRDLGFDSLTAVQLRNALSAATGLRLSATVAFDHPTPAALAAAL

SEQ ID NO: 99 - protein, 874 aa, Micromonospora sp.
EPIAIVGMACRLPGGVSSPDELWELVESGRDAIGPFPADRGWNLDELYDPDPDAAGRSYVREGGFLTGAADFDAGFFGINPREALAMDPQQRLVLEVAWEAFERAGIAPDSLRGTDTGVFLGAFAGGYLTLVNGAADLEGYAGTGNSVSVLSGRLSYVLGLEGPAVTVDTACSSSLVALHQAAQALRLGECSLAVVGGVTVMSTPDSHVEFSRQRALSPDGRCKAFADGADGTGWAEGAGVLVVERLSEARRRGHTVLAVVRGSAVNQDGASNGLTAPNGPSQQRVIRAALASAGLGVGDVDLVEGHGTGTALGDPIEAQALLATYGSDGSPVWLGSLKSNIGHTQAAAGVAGVIKAVESMRRGVMPQTLHVGTPSSHVDWAAGAVELLTANRAWDSVERPRRAAVSSFGISGTNAHVILEGVPAPEPAAGSAESAPLLLSARSAAALAQFESLTSGLRPSRDLASTLSRRAFFDHRAVVLPGGDVVRGRVGDAPVVLVFAGQGSQRADMASRLTAEFPVFAAAHERVWSLLDVDEGLGIDQTGFAQPALFAYEVALAELLDVRPDAVIGHSIGELAAAYVAGAVSLEDACRLVSARARLMQALPPGGAMVSVRVSEEAARAVLRDGVEIAAVNGPQAVVLSGDEDAVLAAAAELGEFKRLRTSHAFHSARMEPMLDEFRAVALTVEFREPEVALSFVPSAEYFVRQVRETVRFGEQVAAFAPGTLFVEVGPDGSLSRLTGGVSAAEPLTALAYLWVRGVGVEWTPYVGGGILDQGAPTYPFQRERYWVRPRLAGRTTDERDALLIDLVRDDVASVLGHSGRRRLETDRPLLELGFDSLTALRLRNRLAAATDVALPATLIFDYPNIQAIAVHL

SEQ ID NO: 100 - protein, 898 aa, Micromonospora sp.
EPLAVVGMACRYPGGVASADDLWRLVAAGGDAVGPFPDDRGWELESLVDPDPEAVGRSTTGQGGFLADAAGFDAAFFGISPREATAMDPQQRLLLEVSWAALEHAGLRADALRGSATGVFMGSNGQDYAGLLAGAPELEGWIGTGVSASVVSGRLSYFYGFEGPAVTVDTACSSSLVALHLAAQSLRTGESSLALVGGVTVMTSPTVFRSFSRQRGLAPDGRCKAFSAGADGTGWSEGVGVLVVERLSDAQRNGHQILAVVRGSAVNQDGASNGLTAPHGPSQQRVINTALTDADLTTTDIDLIEAHGTGTTLGDPIEAQAILATYGNRTTGNPVHLGSVKSNLGHTQAAAGIAGIIKAIQAMRHATMPRTLHIDEPSPHVDWTAGRVELLTSNLPWPATGRPRRAAVSSFGVSGTNAHVILEEAPAPAAVPSIRPVVSGPALPLVFSAKDPDALAEFQSHTPAGEGVAYALATSRSTLDHRSVRIGDVTVTGIAVTDPEVVFVFPGQGTQWAGMGRDLMSASPVFAERMNECAAALEPYLDLWAAIDAPDRVETLQPASWAMMVSLAAVWQAAGVQPAAVIGHSQGEIAAACVSGAISLQDAAAVVALRSKAIAASLGKGAMASIPLPADAIELTGEVWVAALNGPSSTVVAGVPEAVELVRARYEGRRIAVDYASHTPHVEALRGQVVSVPSQAPVIPWFSTVDSGWVEGPLDDDYWFRNLRQPVQFGPAAAGFDNAVFIEVSARPVLIPALDASVTVPSLRRDDGGPERMLASLAQAFVAGVPVDWTTIVPPAPHVDLPSYPFQHQRFWIEGRVTAAAGAERLRIMLEVVLAETATVLGHGGAAAIGPGRAFQDLGFDSLTAVELRNRLAAATGLTLPTTLVFNHPTPEALAAHL

SEQ ID NO: 101 - protein, 947 aa, Micromonospora sp.
EPVAIVGMACRLPGDVESPEDLWRLVAEGRDAVGPFPSDRGWNLGTLDDPDAAGRSYVKEGGFLAGAAHFDPAFFGIGPREALGMDPQQRILLEIAWEALEHARIAPGDLRGSETGVYVGAAAQGYGVDAPLEGNLLTGGSTSAMSGRVAYALGLHGPAVTVDTACSSSLVALHLAAQALRHGECTLALAGGVAVMASPVLFTEFSRQRGLAPDGRCKAFAAAADGTGWSEGAGLVVLERLSDAERHGHRVLAVIRGSAVNSDGASNGLTAPNGTAQRRVIRSALRAAGLGAGDVDVVEAHGTGTTLGDPVEADALIATYGQRSDTPPVRIGSLKSNIGHTVAAAGVAGVIKMVEAMRHGTMPRTLHVDRPTPHVDWSAGAAELLTGELPWPRGDRPRRAAVSAFGLSGTNAHLILEDVAAAAEPPAGDDSGSGSETVPLLLSADDLPAVRDQAARLRAHLLAHPELRMRDVAYALATTRTARPHRAAVTATERELLRELALLAAGDQGPGTQLGEAVPHRRVAFLFDGQGTQRHGMGRALHQRHPVFAAAWDEVCAALDPLLDRGVAEVYFAEAGRDLADDPLYTQAGLFALEVALYRLLTSWGVTPDAVAGHSVGEVAVAHVAGVLSLPDAASLLAARGAALRQLPPGAMAAIRASEDDTRGVLPPDLDVAAVNGPEMTVVSGAEEAVDRFVAEQAGAGRQVRRLRVGRAYHSRHVDAVLAEFGATLSALTFHEPTLPVVSTVTGRPAGAGDLTTPEYWLRHARRPVRFGAALASLSELGMDSFVEVGPSGSLSSMAGETVAGTFHPLLDRRVPDEIGAAAAAGELFTAGMALDWTAVLAGGRPIDLPVYPFRREFYWLGARYDLMAAAVRRDALLDLVRVQVALLLGRADAIGVRDNTSFLDVGLDSLGASRLRNRLAAATGLTLPGGLAFDHPTPARLADHLD

SEQ ID NO: 102 - protein, 913 aa, Catellatospora ferruginea
EPLAIVGMACRLPGGVWSPEDLWHLVASGTDAISDFPADRGWDVEKLFDPDPDAPGKTYCVQGGFLEATAAFDAAFFGISPREALAMDPQQRLMLEVSWEAFERAGIEPGSVRGSDTGVFLGAYPGGYGAGAGADLGGFGATGGAGSVLSGRVSYFFGLEGPAMTVDTACSSSLVALHQAAYSLRQRECSLALVGGVTVMGTPHMFVDFSRQRGLSVDGRCKAFADAADGTSWSEGVGVLLVERLSDAQAKGHRVLAVVKGSAVNQDGASNGLTAPNGPSQQRVIRQALANADLAPHEVDVVEAHGTGTTLGDPIEAQALLATYGQDREQPLLLGSLKSNVGHTQAAAGVSGVIKMVMALQHGVVPRTLHVDEPSRHVDWSAGAVELVTQNQPWPSSDRPRRAGVSSFGVSGTNAHIILESAPAQPLAPSTPITGLVPLVISAKTAPALTAFEARLRSYVTADADLTAIAATLATTRSTFEHRAVLLGDDTVTGIATPDPRVVFVFPGQGWQWLGMGSALRETSVVFKERMAECAAALSEFVDWDLFSVLDDPAVVDRVDVVQPACWAVMVSLAATWQAAGARPDAVVGHSQGEIAAACVAGAISLQDGARVVALRSQLIARLAGHGAMASIALPADQITLTDGVWIAARNGPAATVIAGAPEAVDSVLAAHQDARVRRITVDYASHTPHVEKIRDELLPMLADIDSQTPLVPWLSTVDGLFIEGPLKADYWYRNLREQVGFDTAVNQLPDSIFIEVSASPVLLPGMGDALTVATLRRDEGGQERLVTALAEAYVQGVAVDWAAVIYNTTALVDLPTYPFQHEHYWLDSTRLMGLAAEERDKALVAVVRESAAVVLGHADARAIPATAAFRELGVDSLTAVQLRNSLAKATGLRLPTTLAFDYPTPAVLAARL

SEQ ID NO: 103 - protein, 910 aa, Catellatospora ferruginea
EPLAIVGMACRLPGGVSSPEDLWRLVESGTDAISDLPTDRGWDLDNLYDPDPGAPGKSYCVQGGFLDTVADFDPAFFGISPREALAMDPQQRLVLEVSWEAFERAGIEPGSVRGSDTGVFMGAFGNGYGIDTDGGGFGATAGTGSVLSGRVSYFLGLEGPAMTVDTGCSSALVALHQARYALRQGDCSLALVGGVTVMASPYTFVEFSRQRGMAADGRCKAFADAADGTGWAEGVGVLLVERLSDAEAKGHQVLAVVRGSALNQDGASNGLTAPNGPSQQRVIQAALANAGLVSADVDVVEAHGTGTTLGDPIEAQAVLATYGQDRERPLLLGSLKSNIGHTQAAAGVSGVIKMVMALQHGVVPRTLHVDEPSRHVDWSAGAVELVTENQPWPSVDRPPRAGVSAFGISGTNAHVILEAVPAPPFEPPTPVTGPVPLVISAKTRPALTAFEARLRAYVTADADLTAIASTLATTRSIFEHRAVLLGDDTVTGIAVPDPRVVFVFPGQGWQWLGMGSALRESSVVFAERMAECAAALSDYVDWDLFSVLDDPAVVDRVDVVQPACWAVMVSLAATWQAAGVRPDAVIGHSQGEIAAACVAGAISLRDAAQIVALRSQLIAGLAGHGAMASIALSADQITLTDGAWIAARNGPAATVIAGAPAAVDSVLAAHEDARTRRITVDYASHTPHVEQIRTELLDLTTDLDSRAPVIPWLSTVDVTWVEGPLDADYWYRNLREPVGFDTAVENLPDSVFIEVSANPVLLPAMGDALTVATLRRDAGGQTRLLTALAEAYVQGVAVDWVTVIGATPARVDLPTYAFQHQRYWVADRLHDRPSAEQHRLMRELVQRHAATVLGHASPDTIAADRPFKDLGLDSLTAVELRNHLVAETGLRLSATTAFDHPTADDLAGHL

SEQ ID NO: 104 - protein, 954 aa, Catellatospora ferruginea
EPIAIVAMACRAPGGVSSPEGLWRLVESGTDATSGFPTDRGWDVDNLFDPDPDAAGKTYSVRGGFLETAADFDAAFFGISPREALGMDPQQRLLLETSWEAIERAQIDPKSLRGRDVGVYVGGAAQGYGIGATDQQQENLITGSSISLLSGRVSYALGLEGPGVTVDTACSSSLVALHLASQALRQRECSLALVSGVSVMATPDVFVEFSRQRGLAADGRCKSFSAAADGTTWSEGVGVLVLQRLSEAVREGHRVLAVVRGSAVNSDGASNGLTAPNGVSQQRVIRQALAGAGLTASEVDVVEAHGTGTKLGDPIEAEAILATYGQDRDAPAWLGSLKSNIGHTMAASGVLGVIKMVQAMRHGLLPRTLHVDEPSPHVDWARGDIALLTENQPWPDGTRPRRAGVSSFGLSGTNAHVVLEEYPAPVAAAPPVTPARGGPLPWVLSAQSPNALREQAARLYAALAEDPDWHPLDIGYSLATTRPGFPHRAVAVGSDREDFQRALSKLADGAGWPGLITATAAKDRRVAFLFDGQGTQRLGMGRGLHRRFPVFARAWDAVSAAFAKHLDHSLTDIYLGESSPTNTDLADDTLYAQAGIFTLEVALVELLQDWGVRPDFVTGHSIGEAAAAYVAGVLSLEDVTALIVARGKALRLTPPGDMVALRAGEADVRDFLNRTGAALDLAAVNSPEAVVVSGTPDAVADFRAAWTASGGQARNLTVRHAFHSRHVESALDEFRTTLETLTFRAPKVPLVSTATGRLVGPAELGAPEYWLRQVRQTVRFEDALRDLSGRGVGTFVEIGPSGSLATAGLECLGDDASFHAVQRPRSPEDVCLMTAVAELHAGGTTVDWAKVLAGGRTVDLPVYPFQHRPYWIAPASYPDEPRTMRELVRLEVAGILGLSDPSVILDDSSFLELGFDSLSSLRLGNRLATVTGLDLPSTLLFDYATPAALATHLD

SEQ ID NO: 105 - protein, 906 aa, Catellatospora ferruginea
EPLAIVGMACRLPGGVSTPEDLWRLVESGVDAISDFPADRGWDVANLFDPDPDAPGKTYSVRGGFLDTAADFDAAFFGISPREALAMDPQQRLVLEASWEAFERAGIEPSSVRGSDTGVFMGAFSAGYGTELEGFGATAGAVSVLSGRVSYFFGLEGPAMTVDTACSSSLVALHQAGYALRQGECSLALVGGVTVMASPQSFVEFSRQRGLSVDGRCKAFADAADGTGWAEGVGVLVVERLSDAEAKGHRIQAMVRSSAVNQDGASNGLSAPNGPSQQRVIRQALANAGLTGADVDVVEAHGTGTTLGDPIEAQALLATYGQDREQPLLLGSLKSNVGHTQAAAGVSGVIKMVMALQHGVVPRTLHVDEPSRHVDWSAGAVELVTQNQPWPSFDRPRRAGVSSFGVSGTNAHIILESAPAQPLAPSTPIPGLVPLVISAKTAPALTAFEARLRDYLTADADLTAIAATLATTRSTFEHRAVLLGDDTVTGIAAPDPRVVFVFPGQGWQWLGMGSALCESSVVFASRMAECAAALSEFVDWDLFSVLDDPAVVDRVDVVQPACWAVMVSLAATWQAAGVHPDAVVGHSQGEIAAACLAGAISLQDGARVVALRSQLIARLAGHGAMASIALPADQIALTDGAWIAARNGPAATVIAGAPEAVDSVLAAHGDARVRRITVDYASHTPHVEQIRAELLAILADIDSRPPSIPWLSTVDDALVEGPLKADYWYRNLREPVGFDTAVSALQDAVFIEVSANPVLLPAMGDAATVATLRRDDGGQDRLLTAVAEAYVQGVAVDWAAVIGATGARVLDLPTYAFQHQRFWARAASAAGLAPEALLKVVQDSAAQVLGYADPGAIAVTAAFKDLGIDSLTAVEMRNTLAKKTGLRLPATLVFDYPTPGVLAGRL

SEQ ID NO: 106 - protein, 874 aa, Catellatospora ferruginea
EPLAIVGMACRLPGGVSSPEDLWRLVESGGDAISDFPADRGWDIENLFDPDPDAAGKTYSVRGGFLDAAAGFDAAFFGISPREALAMDPQQRLVLEASWEAFERAGIEPGSVRGSDTGVFMGAYPGGYGTGADVGGFGATAGAVSVLSGRVSYFFGLEGPAMTVDTACSSSLVALHQAGHALRQGECSLALVGGVTVMATPHTFIEFSRQQGLASDGRSKAFADAADGAGFSEGVGVLVVERLSDARAKGHRVLAVVRSSAVNQDGASNGLTAPNGPSQQRVIRQALANAGLTGADVDVVEAHGTGTTLGDPIEAQAVLATYGQDRQKPLLLGSLKSNVGHTQAAAGVSGVIKMVMALQHGVVPRTLHVDEPSRHVDWSAGAVELVTENQPWPSVDRPRRAGVSSFGISGTNAHVILESVPVQLPVPSAGLAPLMISAKTAPALGDAEARLRGYLTADADLPAIASTLATTRSMFEHRAVLLGDTTITGTAAADPKVVFVFSGQGSQRAGMGEQLAFPVFADIHRRVWDLLDVPDLDVDQTGYAQPALFALQVALAGLLESWGVRPQAVIGHSVGELAAGYVAGLWSLEDACTLVSARARLMQALPPGGVMVAVPVSEDQARAALLEGVEIAAVNGPSSVVLSGDETAVLQVAAGLGKWTRLSTSHAFHSARMEPMLEEFRAVAEQVTYRTPVITMAAGAATPDYWVRQVRDTVRFGDQVAAFEGATFVEIGPDRTLARLVDGIAMLHGDDEVEAALTGLARLFVQGVPVAWDNGARVLDLPTYPFQHQRYWLDARRAASAGGDLLKMVRDNAALILGHTNPGAISETTAFRDLGVDSLTAVQLRNSLAKATGLRLPATLVFDYPTPSVLAGRL

SEQ ID NO: 107 - protein, 870 aa, Catellatospora ferruginea
EPLAIVGMACRLPGGVSSPEDLWRLVESGTDAISDFPADRGWDVDNLFDPDPDAPGKTYSVQGGFLDAAAEFDAAFFGISPREALAMDPQQRLVLEASWEAFERAGIEPGSVRGSDTGVFMGAYSGGYGAGADLDGFGATAGAGSVLSGRISYFFGLEGPAMTVDTACSSSLVALHQAGSALRQGECSLAVVGGVTVMATPDLFVEFSRQRGLAADGRCKAFGDAADGTGWAEGVGVLLVERLSDAEAKGHRVLAVVRSSAVNQDGASNGLTAPNGPSQQRVIRSALATAGLAPQDVDVVEAHGTGTTLGDPIEAQAVLATYGQDRERPLLLGSLKSNVGHTQAAAGVSGVIKMVMALQHGVVPRTLHVDEPSRHVDWSAGAVELVTQNQPWPDVDRPRRAAVSAFGVSGTNAHVILESVPAVPPVPSAGPAPLMISAKTAPALGDAEARLRDYLTADADLTAIASTLATTRSTFEHRSVIFENHTITGTAAPDPRVVFVFSGQGSQRAGMGEQLAATFPVFAEIHRRVWDLLDGPDLDVDQTGYAQPALFALQVALVGLLESWGVRPEAVIGHSVGELAAGYVSGLWSLEDACTLVSARARLMQALPPGGVMVAVPVPEDQARAALVEGVEIAAVNGPSSVVLSGDEAAVLQVAAGLGKWTRLATSHAFHSARMEPMLEEFRGVAEQLTYRTPVISMAAEVATPDYWVRQVRDTVRFGDQVAEFEGATFVEIGPDRTLARLIDGIAMLHGDDEVEAALNGLARLFVQGVPVAWDNGGRVLDLPTYPFQRQRYWAVSPEALLKAVRDSAAMILGHADPSAISETAAFRDLGVDSLTAVELRNSLAKATGLRLPATLVFDYPTPAVLAARL

SEQ ID NO: 108 - protein, 875 aa, Catellatospora ferruginea
EPLAIVGMACRLPGGVSSPEDLWRLVESGTDAISDFPTDRGWDAASLFDPDPDAAGKTYSVQGGFLDAAADFDAAFFGISPREALAMDPQQRLVLEASWEAFERAGIEPGSVRGTDTGVFMGAFSAGYGARLEGFGATAGAVSVLSGRVSYLFGLEGPAMTVDTACSSSLVALHQAAYSLRQGECSLALVGGVTVMATPQIFVDFSRQRGLAPDGRCKAFGDNADGTGWAEGVGVLVVERLSDAQAKGHRVLAVVRSSAVNQDGASNGLTAPNGPSQQRVIRQALANAGLTSADVDVVEAHGTGTTLGDPIEAQAVLATYGQDRDRPLLLGSLKSNIGHTQAASGVSGVIKMVMALQHGVVPPTLHADQPSQHVDWSTGAVELVTQSQPWPSVDRPRRAGVSSFGISGTNAHVILESVPAQPPVPSAGPAPLMISAKTAPALGEAEARLRDYLTADADLPAIASTLATTRSIFEHRAVLLGDTTITGTAAADPKVVFVFSGQGSQRAGMGEQLAFPVFADIHRRVWDLLDVPDLDVDQTGYAQPALFALQVALAGLLESWGVRPQAVIGHSVGELAAGYVAGLWSLEDACTLVSARARLMQALPPGGVMVAVPVSEEQARAALTEGVEIAAVNGPSSVVLSGDETAVLQVAAGLGKWTRLSTSHAFHSARMEPMLEEFRAVAEQLTYRTPTITMTEEVTTPDYWVRQVRDTVRFGDQVAAFEGATFVEIGPDRTLARLIDGIAMLHGDDETEAALTGLARLFVQGVPVTWDNKARVLDLPTYPFQRQRYWAGWLAGLAAEERDKALVTVVRDSVAAVLGYADSRKIPVSAAFKDLGVDSLTAVELRNSLAKTTGLRLPATLVFDHPTLATLAARL

SEQ ID NO: 109 - protein, 901 aa, Catellatospora ferruginea
EPLAIVGVACRLPGGVSSPEALWQLVESGTDAISGFPADRGWDVDNLFDPDPEASGKTYCVQGGFLDAVAEFDASFFGISPREALAMDPQQRLILEVSWEAFERAGIEPGSVRGSNTGVFMGAFGSGYGSDLEGFSATAGAGSVLSGRISYFFGLEGPAMTIDTACSSSLVALHQAGYALRQGECSLALVGGATVMATPQTFIEFSRQRGLAADGRCKSFGDNADGTGWSEGVGALLVERLSDAQAKGHRVLAVVRGSAVNQDGASNGLTAPNGPSQQRVIRQALANAGLAPQDVDVVEAHGTGTRLGDPIEAQAVLATYGQDRERPLLLGSLKSNVGHTQAAAGVSGVIKMVMALQHGVVPQTLHVDEPSRQVDWSAGAVELVTENQPWPDVDRPRRAAVSAFGVSGTNAHVILESAPAQPVAPSTPATGLTPLVISAKTAPALTASEARLRDYLTADADLTAIAATLAATRSAFEHRAVLLGDDTVTGIAAPDPRVVFVFPGQGWQWLGMGSALRDSSVVFAERMAECAAALSDYVDWDLFSVLDDPAVVDRVDVVQPACWAVMVSLAATWQAAGVRPDAVVGHSQGEIAAACVAGAISLRDGAKIVALRSQLIARLAGHGAMASIALPADQITLTDGVWIAARNGPAATVIAGAPEAVDSVLSAHGDARVRRIAVDYASHTPHVEQIRTELLPILADIDSQTPRIPWLSTVDDTWIEGPLGADYWYRNLREQVGFDTAVEHLQDSVFIEVSASPVLLPAMGDAITVATLRRDEGGQDRLVTALAEAYVQGVPVDWAAVIDNTTARVLDLPTYAFQHQRFWVANLTPEALLKAVRDSAATVLGHADPGTIPETAAFKDLGIDSLTAVELRNSLAKTTGLRLPATLVFDYPTPGVLAARL

SEQ ID NO: 110 - protein, 882 aa, Catellatospora ferruginea
EPLAIVGMACRLPGGVSSPEDLWRLVESGGDAISDFPVDRGWDVDNLFDPDPDAAGKTYSVQGGFLDTAAEFDAAFFGISPREALAMDPQQRLVLEASWEVFERAGIEPGSVRGSDTGVFMGAYPGYYGIGADLDGFGATAGAGSVLSGRVSYFFGLEGPAMTVDTACSSSLVALHQAGSALRQGECSLALVGGVTVMATPQTYVEFSRQRGLASDGRSKAFADAADGAGFSEGVGVLLVERLSDARRHGHRVLAVVRSSAVNQDGASNGLTAPNGPSQQRVIRQALATAGLSPHEVDVVEAHGTGTTLGDPIEAQAVLATYGQDRDRPLLLGSVKSNIGHTQAAAGVSGVIKMVMALQHGVVPPTLHVDEPSRHVDWSAGAVDLVTENRPWPDLDRPRRAGVSSFGISGTNAHVILESVPAVPPVPSAGPAPLMISAKTAPALGEAEARLRDYLTADADLPAIASTLASTRSTFEHRAVIFQNHTITGTAAADPRVVFVFSGQGSQRAGMGEQLAATFPVFKDIHRRVWDLLDVPDLDVDQTGYAQPALFALQVALFGLLESWGVRPEAVIGHSVGELAAGYVAGLWSLEDACTLVSARARLMQALPPGGVMVAVAVSEEHAQAALIKGVEIAAVNGPSSVVLSGDETAVLQVAAGLGKWTRLSTSHAFHSARMEPMLEKFRAVAEQLTYRTPVITMAAEVTTPDYWVRQVRDTVRFGDQVAAFEGATFVEIGPDRTLARLVDGIAMLHGDDEVEAALTGLARLFVQGVPVTWDNGGRVLDLPTYAFQRQRYWATSTRWLAGLTPQERENALLKVVRDNAAVVLGHAGAGAIPATAAFRDLGVDSLTAVELRNSLATTTGLRLPATMVFDYPTPAAVAARL

SEQ ID NO: 111 - protein, 902 aa, Catellatospora sp.
EPLAIVGMACRLPGGVSSPEDLWRLVESGTDAISDFPTDRGWDVESLFDPDPDAAGKTYSVRGGFLDAAASFDAAFFGISPREALAMDPQQRLVLEASWEAFERAGIEPSSVRGSDTGVFMGAFSAGYGTELEGFGVTAGAVSVLSGRVSYFFGLEGPAMTVDTACSSSLVALHQAGYALRQGECSLALVGGVTVMASPQSFVEFSRQRGLSVDGRCKAFADAADGTGWAEGVGVLVVERLSDAQAKGHRVLAVVRSSAVNQDGASNGLSAPNGPSQQRVIRQALANAGLTGADVDVVEAHGTGTTLGDPIEAQAVLATYGQDREQPLLLGSLKSNIGHTQAAAGVSGVIKMVMALQHGVVPRTLHIDEPSQHVDWSAGAVELVTQNQPWPGNDRPRRAGVSSFGVSGTNAHVILESAPTQPALPSVTATGPVPLVISAKTAPALTAFEARLRDYLTADADLTAIAATLATTRATFDHRAVLLGDDTVTGVAVPEPRVVFVFPGQGWQWLGMGSALSESSVVFAERMAECATALDEFVDWDLFSVLDDPAVVDRVDVVQPACWAVMVSLAATWQAAGVHPDAVIGHSQGEIAAACVAGAISLRDGARIVALRSQLIARLAGHGAMASIALPADQITLTDGVWIAARNGPAATVIAGDPAAVDSVLAAHQDARVRRITVDYASHTPHVEQIRAELLAILSDIGSQTPVIPWLSTVDGEWVEGPLGNDYWYRNLRETVGFDTAVGLLPDSVFIEVSASPVLLPAMGDAVTVATLRRDDGGLTRLLTALAEAWVQGVAVDWAIGATTARVLDLPTYAFQHQHYWAVTGTGLTPEALLKVVQDSTAQVLGYTDAAAIAVTAAFKDLGIDSLTAVEMRNTLAKATGLRLPATLVFDYPTPSLLAGRL

SEQ ID NO: 112 - protein, 888 aa, Catellatospora sp.
EPLAIVGMACRLPGGVSSPEDLWRLVESGTDAISDFPTDRGWDVESLFDPDPDAAGKTYSVRGGFLDAAAGFDAAFFGISPREALAMDPQQRLVLEASWEAFERAGIEPGSVRGSDTGVFMGAYPGGYGTGVDVGGFGATAGAVSVLSGRVSYFFGLEGPAMTVDTACSSSLVALHQAGHALRQGECSLALVGGVTVMATPHTFIEFSRQQGLASDGRSKAFADAADGAGFSEGVGVLVVERLSDAQAKGHRVLAVVRSSAVNQDGASNGLTAPNGPSQQRVIRQALADAGLVSADVDVVEAHGTGTTLGDPIEAQAVLATYGQDREHPLLLGSLKSNVGHTQAAAGVSGVIKMVMALQHGVVPRTLHVDEPSRHVDWSAGAVNLVTENLPWPSLDRPRRAGVSSFGISGTNAHVILESVPAQPPVSSTGPAPLVISAKTGPALTAFEARLRTYLAAASEVDLGAVAATLATTRSVFEHRAVLLGEETIAGTAAVDPRVVFVFSGQGSQRAGMGEQLADAFPVFADIHRRVWDLLDVPDLDVNQTGYAQPALFALQVALFGLLESWGVRPAAVIGHSIGELAAGYVSGLWSLEDACTLVSARARLMQALPPGGVMVAVPVSEEQARGVLVEGVEIAAVNGPSSVVLSGDEAVVLQVASGLGKWTRLSTSHAFHSARMEPMLEEFQAVAEQLTYRTPAIEMAAGEEVTTPDYWVRQVRDTVRFGEQVAAFSDAVFVEVGPDRTLARLIDGVAMLHGDDEPSAALTGLATLFVQGVPVDWSAVVSGTEARVLDLPTYAFQHQRYWLDRKAARRAASAGGDLLKMVRGNAALILGHADPSAIAATTAFRELGVDSLTAVQLRNSLAKATGLRLPATLVFDYPTPAVLAGRL

SEQ ID NO: 113 - protein, 880 aa, Catellatospora sp.
EPLAIVGMACRLPGGVSSPEDLWRLVESGTDAISDFPPDRGWDVENLFDPDPDAPGKTYSIHGGFLDTAAEFDAAFFGISPREALAMDPQQRLVLEASWEAFERAGIEPGSVQGSDTGVFMGAYSAGYGAGADLDGFGATAGAGSVLSGRISYFFGLEGPAMTVDTACSSSLVALHQAGSALRQGECSLALVGGVTVMATPDLFVEFSRQRGLATDGRCKAFADTADGTGWAEGVGVLLVERLSDAQAKGHRVLAVVRGSAVNQDGASNGLTAPNGPSQQRVIRQALANAGLAPHEVDVVEAHGTGTTLGDPIEAQAVLATYGQDREQPLLLGSLKSNVGHTQAAAGVSGVIKMVMALQQGVVPQTLHVDEPSQHVDWSAGAVNLVTQNQPWPDIDRPRRAAVSAFGVSGTNAHVILESVPASPPVPSTGPAPLVISAKTVPALTAFEARLRTYLAAVPEVDLGAVAATLATTRATFEHRAVLLGEETIAGTAAVDPRVVFVFSGQGSQRAGMGEQLAAAFPVFADIHHRVWELLDIPDLDVDQTGYAQPALFALQVALFGLLESWGVRPAAVIGHSVGELAAGYVSGLWSLEDACTLVSARARLMQALPPGGVMVAVPVSEEQARAVLVEGVEIAAVNGPSSVVLSGDEAVVLQVASGLGKWTRLSTSHAFHSARVEPMLEEFRVIAGQLTYRTPVIEMAAGEQVTSPDYWVRQVRDTVRFGEQVAAFSDAVFVEIGPDRTLARLIDGVALLHGDDETEAAMAGLARLFVQGVPVDWSAVLGGTEARVLDLPTYAFQHQRYWAALTPEALLKVVRDSAAMVLGHADPSAISGTAAFRDLGLDSLTAVELRNSLAKATGLRLPATLVFDYPTPSVLAGRL

SEQ ID NO: 114 - protein, 886 aa, Catellatospora sp.
EPLAIVGMACRLPGGVSSPEDLWRLVESGTDAISDFPPDRGWDTASLFDPDPDAAGKTYSVQGGFLDAVAEFDAGFFGISPREALAMDPQQRLVLEASWEAFERAGIEPGSVRGTDTGVFMGAFSAGYGAHLEGFGATAGAVSVLSGRVSYLFGLEGPAMTVDTACSSSLVALHQAAYSLRQGECSLALVGGVTVMATPQIFVDFSRQRGLAADGRCKAFADDADGTGWAEGVGVLVVERLSDAQAKGHRVLAVVRSSAVNQDGASNGLTAPNGPSQQRVIRQALANAGLTSADVDVVEAHGTGTTLGDPIEAQAVLATYGQDREQPLLLGSLKSNLGHTQAAAGVSGVIKMVMALQHGIVPRTLHVDQPSQHVDWSAGAVELVTENQPWPSLDRPRRAGVSSFGISGTNAHVILESVPASPPVPSTGPAPLVISAKTGPALTAFEARLRTYLAATPDADLPTIASTLATTRSVFEHRAVLLGEETIAGTAAVDPRVVFVFSGQGSQRAGMGEQLADAFPVFADIHRRVWDLLDVPDLDVNQTGYAQPALFALQVALFGLLESWGVRPAAVIGHSIGELAAGYVSGLWSLEDACTLVSARARLMQALPPGGVMVAVPVSEEQARGVLVEGVEIAAVNGPSSVVLSGDEAVVLQVASGLGKWTRLSTSHAFHSARMEPMLEEFQAVAEQLTYRTPAIEMAAGEEVTTPDYWVRQVRDTVRFGEQVAAFSDAVFVEVGPDRTLARLIDGVAMLHGDDEPSAAGTALARLHVQGVPVDWSAVLGGTGARVLDLPTYAFQRQRYWAGWLAGLAAEERDKALVTVVRDSVAAVLGYADSRKIALSASFKELGVDSLTAVELRNNLAKTTGLRLPATLVFDHPTLAAMAARL

SEQ ID NO: 115 - protein, 902 aa, Catellatospora sp.
EPLAIVGVACRLPGGVSSPEALWRLVESGTDAISGFPADRGWDVDNLFDPDPEASGKTYCVQGGFLDTVADFDASFFGISPREALAMDPQQRLILEVCWEAFERAGIEPGSVRGSDTGVFMGAFGSGYGSDLEGFSATAGAGSVLSGRISYFFGLEGPAMTVDTACSSSLVALHQAGYALRQGECSLALVGGATVMATPQTFIEFSRQRGLAADGRCKSFGDNADGTGWSEGVGALLVERLSDAQAKGHRVLAVVRGSAVNQDGASNGLTAPNGPSQQRVIRQALANAGLAPHEVDVVEAHGTGTRLGDPIEAQAVLATYGQDRERPLLLGSLKSNVGHTQAAAGVSGVIKMVMALQHSVVPQTLHVDAPSRQVDWSAGAVELVTQNQPWPETGRARRAAVSAFGVSGTNAHVILESAPAQPPAPSTPVTGPVPLVISAKTASALGQAEARLRTYLADKPDADLAAIAATLATTRSTFEHRAVLLGDETIRGVAVPDPRVVFVFPGQGWQWLGMGSALRESSVVFAERMAECAAALSDYVDWDLFSVLDDLAVVDRVDVVQPACWAVMVSLAATWQAAGVRPDAVIGHSQGEIAAACVAGAISLRDAAQIVALRSQLIAGLAGQGAMASIALPADQITLTDGVWIAARNGLAATVIAGDPAAVDGVLAAHQDARVRRITVDYASHTPHVEQIRTELLDLTTDISSRTPAIPWLSTVDSTWIEGPLDTDYWYRNLREPVGFDTAVNLLPDSVFIEVSASPVLLPAMGDAATVATLRRDDGSQTRLLTALAEAYVQGVAIDWTIGATTARVLDLPTYAFQHQRFWVANALTPEALLKVVRDSAATVLGHADPGTIPETAAFKDLGVDSLTAVELRNSLAKATGLRLPATLVFDYPTPSVLAGRL

SEQ ID NO: 116 - protein, 886 aa, Catellatospora sp.
EPLAIVGMACRLPGGVSSPEDLWRLVESGTDAISDFPADRGWDIENLFDPDPDAPGKTYSVQGGFLDTAAEFDAGFFGISPREALAMDPQQRLVLEASWEVFERAGIEPGSVRGSDTGVFMGAYPGYYGIGADLDGFGATAGAGSVLSGRVSYFFGLEGPAMTIDTACSSSLVALHQAGSALRQGECSLALVGGVTVMATPQTYVEFSRQRGLASDGRSKAFADAADGAGFSEGVGVLLVERLSDARRHGHRVLAVVRSSAVNQDGASNGLTAPNGPSQQRVIGSALANAGLAPHDVDVVEAHGTGTALGDPIEAQAVLATYGQDREQPLLLGSVKSNLGHTQAAAGVSGVIKMVMALQHGIVPRTLHVDEPSRHVDWSAGAVELVTENQPWPEHDRPRRAGVSSFGISGTNAHVILESVPAQPPVSSTGPAPLVISAKTASALGQAEARLRTYLTVDADLPAIAATLATTRAVFEHRAVLLGDTTITGVAADPRVVFVFSGQGSQRAGMGEQLAAAFPVFADTHRRVWDLLDVPDLDVDQTGYAQPALFALQVALFGLLESWGVRPEAVIGHSVGELAAGYVSGLWSLEDACALVSARARLMQALPPGGVMVAVAVSEEQARTALVEGVEIAAVNGPGSVVLSGDEAVVLQVASGLGKWTRLATSHAFHSARMEPMLEEFRAVAEQLTYRTPAIEMAAGEQVTTPDYWVRQVRDTVRFGEQVAAFGDAVFVEIGPDRTLARLIDGVAMLHGDDETEAAMAGLAKLFVEGIPVDWSAVLGGNAARVDLPTYAFQRQRYWAASLLAGLTPEERGNALLKVVRDNAAVILGHAGAAAIPATAAFRDLGVDSLTAVELRNSLATSTGLRLPATMVFDYPTPAAMAARLD

SEQ ID NO: 117 - protein, 914 aa, Catellatospora sp.
EPLAIVGMACRLPGGVFSPEDLWHLVESGTDAISGFPADRGWDVEKLFDPDPDAPGKTYCVQGGFLEATAAFDAAFFGISPREALAMDPQQRLMLEVSWEAFERAGIEPGSVRGSDTGVFLGAYPGGYGAGAGTDLGGFGATGGAGSVLSGRVSYFFGLEGPAMTVDTACSSSLVALHQAAYSLRQRECSLALVGGVTVMGTPHMFVDFSRQRGLSVDGRCKAFADAADGTSWSEGVGVLLVERLSDAQAKGHRVLAVVRGSAVNQDGASNGLTAPNGPSQQRVIRQALANAGLAPHEVDVVEAHGTGTTLGDPIEAQAVLATYGQDREQPLLLGSLKSNVGHTQAAAGVSGVIKMVMALQRGVVPQTLHVDQPSRHVDWSAGAVDLTTENRPWPDTDRPRRAGVSSFGVSGTNAHVILESAPAQPPTPSTPVTGPVPLVISAKTASALGQAEARLRDYLTADADLTAIAATLAITRSTFEHRAVLLGDDTITGVATPDPRVVFVFPGQGWQWLGMGSALRESSVVFAERMAECAAALDEFVDWDLFSVLDDPAVVDRVDVVQPACWAVMVSLAATWQAAGVRPDAVIGHSQGEIAAACVAGAISLRDGAKIVALRSQLIAGLAGQGAMASIALPADQITLTDGVWIAARNGPAATVIAGTPSAVDSVLAAHQDARVRRITVDYASHTPHVEQIRTELLGILADIDSQTPLIPWLSTMEGTWVEGPLHSDYWYRNLREPVGFDTAVSLLPDSVFIEVSASPVLLPAMGDALTVATLRRDEGGQNRMFTALAEAYVQGVAVDWAAVIGATTARVLDLPTYAFQHEDYWLDSTRLMGLAAEERDKALVTVVRESAAVVLGHADARAIPVTAAFRELGVDSLTAVQLRNSLAKATGLRLPTTLAFDYPTPAVLAARL

SEQ ID NO: 118 - protein, 908 aa, Catellatospora sp.
EPLAIVGMACRLPGGVLSPEDLWRLVESGTDAISGLPTDRGWDIDNLYDPEPGAPGKSYCVQGGFLDTVADFDPAFFGISPREALAMDPQQRLVLEVSWEAFERAGIEPGSVRGSDTGVFMGAFGNGYGIDTDGGGFGATAGTGSVLSGRVSYFLGLEGPAMTVDTGCSSALVALHQARYALRQGDCSLALVGGVTVMASPYTFVEFSRQRGMAANGRCKAFADAADGTGWAEGVGVLLVERLSDAEAKGHRVLAVVRGSALNQDGASNGLTAPNGPSQQRVIQAALANAGLVSADVDVVEAHGTGTTLGDPIEAQAVLATYGQDREHPLLLGSLKSNIGHTQAAAGVSGLIKMVMALQHGVVPQTLHVDEPSRHVDWSAGAVELVTENRPWPSVDRPRRAGVSAFGISGTNAHVILESAPPSPAPSTPVTGLVPLVISAKTAPALGQAEARLRDYLTADVDLTAIAATLVTTRSTFEHRAVLLGDDTVTGVAVPDPRVVFVFPGQGWQWLGMGSALRESSVVFAERMAECASALSDYVDWDLFTVLDDPAVVDRVDVVQPACWAVMVSLAATWQAAGVRPDAVIGHSQGEIAAACVAGAISLRDAAQIVALRSQLIAGLAGHGAMASIALPADQITLTDGVWIAARNGPTATVIAGNPQAVDSVLAAHQDARVRRITVDYASHTPHVEQIRTELLDLTTDVGSRTPAIPWLSTVDGEWVEGPLDTDYWYRNLREPVGFDTAVGMLPDSVFIEVSASPVLLPAMGDAATVATLRRDDGGQTRLLTALAEAYVQGVAVDWAVGATTARVLDLPTYAFQHQRYWVADRLHDRPGVEQHRLMRELVLRHAATVLGHDSPDAIAADHPFKDLGLDSLTAVELRNHLVAETGLRLSATTAFDHPTADDLARHL

SEQ ID NO: 119 - protein, 955 aa, Catellatospora sp.
EPIAIVSMACRAPGGVSSPEGLWRLVESGTDATSGFPTDRGWDVENLFDPDPDAAGKTYSMRGGFLETAADFDAPFFGISPREALGMDPQQRLLLETAWEAIERAQIDPKSLRGQDVGVYVGGAAQGYGIGATDQQQENLITGSSISLLSGRVSYALGLEGPGVTVDTACSSSLVALHLAGQALRQRECSLALVSGVSVMATPDVFVEFSRQRGLAADGRCKSFAASADGTTWSEGVGVLVLQRLSEAVRQGHRVLAVVRGSAVNSDGASNGLTAPNGVSQRRVIRQALASAGLAASEVDVVEAHGTGTKLGDPIEAEAILATYGQDRAAPAWLGSLKSNIGHTMAASGVLGVIKMVEAMRHGLLPRTLHVDEPSSHVDWERGDVALLTENQPWPDSTRPRRAGVSSFGLSGTNAHVVLEEYPAPAAADPPVTPAGGGPLPWVLSAQSPNALREQAARLYAALAEDPDWRPLDIGYSLATTRAGFPHRAVAVGSDREEFQRALSKLADGTGWPGLITATAAKDRRMAFLFDGQGTQRLGMGKGLHRRFPVFARAWDAVSAAFAKHLDHSLTDIYLGPSSPASAELADDTLYAQAGIFTMEVALVELLEDWGVRPDFVAGHSIGEAAAAYTAGMFSLEDVTALIVARGRALRLTPPGEMVALRGGEADVRELLQRTGAALDLAAVNSPEAVVVSGAPDAVAEFRAAWTASGRRARDLTVRHAFHSRHVESVLDEFRATLAALTFRAPALPVVSTMTGRLADPAEMGTPEYWLRQVRQTVRFEEAVRELSGQGVGTFVEIGPSGALATAGLECLGGDATFHAVQRPRAPEDVCLMTAVAELHAGGTAVDWTKILAGGRPVDLPVYPFQHRPYWIAPAPSYPDEPRTMRELVRLEVAGILGLSDPSVILDDSSFLELGFDSLSSMRLGNRLATVTGLDLPSTLLFEYATPAALATHLD

SEQ ID NO: 120 - protein, 917 aa, Actinoplanes sp.
EPLAIVGMACRLPGGVESPDDLWRLVASGTDAISGFPRDRGWDVDNLYDPDPDAPGKTYTVLGGFLDSVAGFDASFFGISPREALAMDPQQRLVLEVAWEAFEHAGIAPRSVRGTDTGVFMGAFSSGYDAELEEFGMTGDAVSVLSGRVSYFFGLEGPAMTVDTACSSSLVALHQASSALRQGECSLALVGGVTVLATPKTFVEFSRQRGLAGDGRSKAFADAADGAGWSEGVGVLLVERLSDARAKGHHVLGVVRGSAVNQDGASNGLSAPNGPSQQRVIRQALAGAGLSPHEVDVVEAHGTGTKLGDPIEAQAVIATYGQDRDQPALLGSLKSNVGHTQAAAGVAGVIKMVMALQHATVPATLHVDAPTRHVDWTAGAVELVTENRPWPETGRARRAAVSSFGISGTNAHVILESAPAAAPEETEPVAPVVASDRVPLVISAKTPAALTSTEDRLRAYLAAHPGTDPRAVASTLATTRSVFEHRAVLLGENTVTGSVAGADPRVVFVFPGQGWQRLGMGRELLAASPVFAGRMAECATVLREFVDWDLFTMLDDPAVVDRIEVVQPVCWAIMVSLAAVWQAAGVRPDAVIGHSQGEIAAACVSGAVSLRDAARIVTFRSDMIARMTGHGVMASVALHADDIPLVEGAWVAARNGPAATVVAGTPEAVDQVLAACEERGARVRRITAGVASHTPLAEHVRGELLDATGGLPSRVPDIPWLSTVDGTWVEKPLDPAYWFRNMREPVGFAPAVDLLRAQGDHVFLEISASPVLLPSMDDAVTVATLRRDDGSADRMLAALAEAHTHGVVVDWPRVLGTAGRVRGLPTYAFQHQRYWAVSRPAVLTPDALLKVVRDSAATVLGYTDADSITVTTAFRDLGVDSLSAVELRNNLAKSTGLRLPATLVFDYPTPADLATHL

SEQ ID NO: 121 - protein, 881 aa, Actinoplanes sp.
EPLAIIGMACRLPGGITSPEDLWRLVASGSDAISDFPDDRGWDVGNLYDPDPDAPGRSTTVRGGFLDEVAGFDASFFGISPREALAMDPQQRLVLEVSWEAFERAGIEPGTVRGSDTGVFMGAYPGGYGVGADLGGFGTTAVSGSVLSGRVSYFFGLEGPAMTVDTACSSSLVALHQAGHALRQGECSLALVGGVTVMPTPNIFVEFSRQRGLAADGRCKPFADAADGTGFSEGAGVLLVERLSDAQTNGHHILAVVRASAVNQDGASNGLTAPNGPSQQRVIRSALANAGLTTADVDVVEAHGTGTTLGDPIEAQAVIATYGQDRAQPVLLGSLKSNIGHTQAAAGVSGVIKMVMALRNGTVPRTLHVDEPSRHIDWTAGAVELATENRPWPETERPRRAGVSSFGISGTNAHVILESTPTQPVEPSTPAAHPLPLPISAKTPPALAALEARLRAYLTSETDLAAVASTLASTRAVFEHRAVLLGDETIVGVAALDPRVVFVFSGQGSQRAGMGEQLAAVFPVFAQIHREVLDLLDIPDLDIDQTGHAQPALFAFQVALAGLLDSWGVRPDAVIGHSIGELAAAYIAGLWSLEDACTLVSARARLMQALPSGGAMVAVQATEEQARAVLIDGVEIAAVNGPSSVVLSGDETAVLQVAAELGGKSARLKTSHAFHSARMEPMLDQFRQVAEQLTYRSPVIEMAAGTTSDYWVRQVRDTVRFGDQVRVHQGSVLVEIGPDRTLARLIDGIATSHGDDEVRAVMTALAELHVRGVAVDWPGTTSARVLDLPTYAFQHERYWLANTAAELTAADLLKAVRDSAAVVLGHADADSIPATTAFKDLGFDSLTAIELRNRLAKDIGLRLPATMAFDYPTPAALAARL

SEQ ID NO: 122 - protein, 887 aa, Actinoplanes sp.
EPLAIVGMACRLPGGVTSPEDLWRLVASGTDAITEFPTDRGWDVGNLYDPDPDAPGKSTTVHGGFLEGVAGFDASFFGISPREALAMDPQQRLVLEVSWEAFERAGIEPGAVRGSDTGVFMGAYPGGYGVGADLGGFGTTAGAGSVLSGRVSYFFGLEGPAMTVDTACSSSLVALHQAGHALRQGECSLALVGGVTVMPTPNIFVEFSRQRGLSADGRCKPFADAADGTGWSEGVGVLVVERLSDARANGHRILAVVRGSAVNQDGASNGLTAPNGPSQQRVIRQALANAGLTTADVDVIEAHGTGTTLGDPIEAQAVIATYGQDRTQPVLLGSLKSNIGHTQAAAGVSGVIKMVMALQHDTVPASLHVDEPSRHVDWTAGAVELATESRPWPKTGRAHRAGVSSFGVSGTNAHVILESAPTQPEEPSTPAPHPLPLPVSAKTSAALTDLEDRIRAYLTPETDLAAVASTLASTRAMFEHRAVLLGDETITGVAAPDPRLVFVFSGQGSQRAGMGEQLAAVFPVFAQIHREVLDLLDVPDLDIDQTGHAQPALFAFQVALAGLLDSWGVRPDAVIGHSIGELAAAYVAGLWSLQDACALVSARARLMQALPPGGAMVAVAVPEEQARAVLIDGVEIAAVNGPSSVVLSGDETAVLQVAAELGGKSTRLRTSHAFHSARMEPMLDQFRQVAEQLTYRSPVIEMAAGTTPDYWVRQVRDTVRFGDQVRVHQGSVLVEIGPDRTLARLIDGIATSHGDDEVRAAMTALAELHVRGVAVDWPGTTSARVLDLPTYAFQHRRYWVAPARRAAGRPADLTPEGLLTTVRDSAAVVLGHADASAIPATAAFQALGVDSLIAVELRNNLAKNTGLRLPATLIFDYPTPVDLATHL

SEQ ID NO: 123 - protein, 886 aa, Actinoplanes sp.
EPLAIIGMSCRLPGGVTSPEDLWRLVASGTDAITGFPADRGWDLENLYDPDPDAPGRTTTVQGGFLDDVAGFDASFFGISPREAVAMDPQQRLALEASWEAFERAGIEPGSVRGSDTGVFMGAYPGGYGIGADLGAFMLTGRAGSVLSGRLSYFFGLEGPAMTVDTACSSSLVALHQASYALRQGECSMALVGGVTVMPTPVMFVEFSRQRNLADDGRCKAFADGADGTGWSEGVGVLLVERLSDALAKGHRIMAVVRGSAVNQDGASNGLTAPNGPSQQRVIQSALDSAGLTTADVDVIEAHGTGTTLGDPIEAQAVIATYGQDRAQPVLLGSLKSNIGHTQAAAGVSGVIKMVMALQNGVVPRTLHVDEPSRHVDWTAGAVELATENRPWPEVGRARRAAVSSFGFSGTNAHVILESAPAQPATPSAPVAHLLPLPISAKTPPALADLEARLRAYLTPEADLPAVASTLASTRAVFEHRAVLLGDETIVGIAALDPRVVFVFSGQGAQRAGMGEQLAAVFPVFAQIHREVLDLLDIPDLDIDQTGHAQPALFAFQVALAGLLESWGVRPDAVIGHSIGELAAAYIAGLWSLEDACALVSARARLMQALPSGGAMVAVQATEDQARAVLIDGVEIAAVNGPSSVVLSGDETAVLQVAAGLGGKSTRLRTSHAFHSARMEPMLDQFRQVAEQLTYRSPVIEMAAGVTPDYWVRQVRDTVRFGDQVRVHQGSVLVEIGPDRTLARLIDGIATSHGDDEVQAAMTALAELHVRGVAVDWPGTTSARVLDLPTYAFQHQRYWTVSWLAGLTPEEREGALVKVVRDSAAVVLGHADAGTIPVTAAFKDLGLDSLTAVELRNSLARSTGLRLPATMVFDYPTLGALAARLD

SEQ ID NO: 124 - protein, 914 aa, Actinoplanes sp.
EPLAIVGMACRLPGGVTSPEDLWRLVESGTDAVSAFPADRGWDADALYDPDPEAAGKTYCVRGGFLDGVAGFDASFFGISPREALAMDPQQRLILEASWEAFERAGIEPGSVRGSDTGVFMGAFPGSYGVDADLGGFGMTGGAASVLSGRVSYFFGLEGPAMTVDTVCSSSLVALHQAGHALRQGECSLALVGGVTVMSTPDTFVEFSRQRGLAADGRCKAFGDGADGTGWAEGAGVLLVERLSDAQAKGHRILAVVRGSAVNQDGASNGLTAPNGPSQQRVIRSALANAGLSSADVDVVEAHGTGTKLGDPIEAQAVLDTYGQDRERPLLLGSLKSNVGHTQAAAGVSGVIKMVMALQHGVVPRTLHADVPSRQVDWTAGAVELVTENRSWPEADRPRRAAVSSFGLSGTNAHVILESPPDQPTTASAPTTGPVPLPISAKTPAALADLETRLRAYLTPETDLPAVAATLAVNRSLFEHRAVLIGDDTITGTASTEPRVVFVFPGQGWHWLGMGSALLASSAVFADRMAECNAALSEFVDWDLFTALDDPAVFDRVDVVQPTCWAVMVSLAAVWQHAGVRPDAVLGHSQGEIAAACFAGAISLQDAARIVALRSRLIGRLAGRGAMASVSLPPDEIPLIDGVTVAVLNGPSAVIAGAPDAVDAVLADCEARGARVRKINVDYASHTPHVEQIRTELLDITAGITAETPTVPWLSTVDGTWIDRPLDTEYWYRNLREPVGFGATIELLQAQGDTIFIEVSASPVLLQAIDDSIAIPTLRRDDGTPTRLLTALAEAHVHGVTIDWAKLLGSTASPVNLPTYAFQRQRYWAASAAAGRPAELTPEHLLKVVRDSAAVVLGHTDAGAIPATAAFQALGVDSLIAVELRNNLAKSTGLRLPATLIFDYPTPADLATHL

SEQ ID NO: 125 - protein, 948 aa, Actinoplanes sp.
EPLAIIGMACRLPGGITSPEDLWRLVESGSDAISDFPDDRGWDVDRLFDPDPDAAGKTYTTQGGFLSEVAGFDASFFGISPREAVAMDPQQRLVLEVAWEAFERAGIEPGTVRGSDTGVFMGAYPDGYGSGTDLAGFGVTAGAGSVLSGRVSYFFGLEGPAMTVDTACSSSLVALHQAGSALRQGECSLALVGGVTVMPTPRTFVEFSRQRGLAADGRCKPFADAADGTGFSEGAGMLVVERLSDAQTNGHHILAVVRASAVNQDGASNGLTAPNGPSQQRVIQSALAGAGLVSADIDVIEAHGTGTTLGDPIEAQAVIATYGQDRSQPVLLGSLKSNIGHTQAAAGVSGVIKMVMALQHDTVPATLHVDEPSRHVDWTAGAVALVTENQPWPRNGHARRAGVSSFGVSGTNAHVIIEEAPAEPPVEPVPAADVVVPLVVSARDAIPLGDQAARLAALVEAPDGPVLPALADALLTRRTTFAQRAVVVAGSRDDAAAGLRALATGTAHPALVTGAAGTSGRVVLMFPGQGSQWDGMGAQLIGASPVFAARIADCAAALQPWIDWDLQDVLRGNAPTDLLERVDVVQPASFAVMVGLAAVWESVGVRPDAVLGHSQGEIAAAYVAGALTLADAAKVVAVRSRLIAARLGRGGMASVALSPQDAAARRGRAELAAVNSPASVVLAGASEALDETLAALEADGVRVRRVAVDYASHTGHVEELEQDLAEALADVRSQAPLVGFRSTVTGEWVTEAGALDGGYWYRNLRQQVRFGPAVAALAEDGYSVFVEASAHPVLVQPVTETLDRTDAVVTGSLRRQDGGLSRLLTSVAEVFVGGVPVDWAGLLPAGAGRSWVDLPTYAFDHQHYWLPAGGTRGRSEAELLELVRGRAAAVLGHTDAGSIPATAAFKDLGLDSLTAVELRNSLAKSTGLRLPATMVFDYPTPAAVAARL

SEQ ID NO: 126 - protein, 866 aa, Actinoplanes sp.
EPLAIVGMACRLPGGITSPEDLWRLVASGSDAISDLPVDRGWTVDGHFQGGFLDEVAGFDASFFGISPREAVAMDPQQRLVLEVAWEAFERAGIEPGSVRGTDAGVFMGAYADGYGMGTDLGGFGMTSVAVSVLAGRISYFFGLEGPAMTVDTACSSSLVALHQAGHALRQGECSLALVGGVTVMPTPQTFVEFDRQRGLAADGRCKAFADAADGTSFSEGAGMLVVERLSDALANGHHILAVVRGSAVNQDGASNGLTAPNGPSQQRVIRSALANAGLTTADVDVVEAHGTGTTLGDPIEAQAVIATYGQNRQRPLLLGSLKSNIGHTQAAAGVSGVIKMVMALRNGTVPATLHVDEPSRHIDWTAGAVALVTENQPWPETERPRRAGVSSFGISGTNAHVILESTPTPPATLSAQVAHPLPLPISAKTPPALADLEARLRAYLTPEADLAAVASTLASTRAVFEHRAVLLGDETIVGVAALDPRVVFVFSGQGSQRAGMGEQLAAVFPVFAQIHREVLDLLDIPDLDIDQTGHAQPALFAFQVALAGLLDSWGVRPDAVIGHSIGELAAAYVAGLWSLQDACALVSARARLMQALPSGGAMVAVAVPEDEARAVLIDGVEIAAVNGPSSVVLSGDETAVLQVAESLGGKSARLKTSHAFHSARMEPMLDQFRQVAEQLTYRSPVIEMTAGVTPDYWVRQVRDTVRFGDQVRVHQGSVLVEIGPDRTLARLIDGIATSHGDDEVQAVMTALAELHVRGVAVDWPGTTSARVLDLPTYAFQHDHYWAHPVDRTPEALLALVRDSAAVALGHAGAATVPATAAFQSLGMDSLIAVELRNNLARSTGLRLPATLVFDYPTPAALATRL

SEQ ID NO: 127 - protein, 901 aa, Actinoplanes sp.
EPLAIVGMACRLPGGVTSPEDLWRLVASGTDAITGLPTDRGWEEDDRFRGGFLAGVAGFDASFFGISPREAVAMDPQQRLVLEASWEAFERAGIEPGSVRGSDTGVFMGAYPGGYGFGADLGGFALTSGSGSVLSGRVSYFFGLEGPAMTVDTACSSSLVALHQAGYALRQGECSLALVGGVTIMPTPQTFIEFERQRGLAADGRSKAFADSADGTGWSEGVGVLVVERLSDAQANGHHILAVVRGSAINQDGASNGLTAPNGPSQQRVIRSALANAGLTTADIDVIEAHGTGTTLGDPIEAQAVIATYGQDRSQPVLLGSLKSNIGHTQAAAGVSGVIKMVMALQHDTVPATLHVDRPSRHVDWAAGAVELVTENRPWPENGRVRRAGVSAFGVSGTNAHVILESPPDQPVKPSAPAAGPVPLPISAKTPAALAALENRLRAYLTPETDLPAVASTLATTRAMFEHRAVLLGDDTITGTASTEPRVVFVFPGQGWHWLGMGSALLASSAVFADRMAECNAALHEFVDWDLFTALDDPAVFDRVDIVQPTCWAVMMSLAALWQHAGVRPDAVLGHSQGEIAAACFAGAISLQDAARIVALRSQLIGRLAGRGAMASVSLPPDEIPLIDGVTVAVLNGPSAVIAGSPEAVDAVLADCEARGARVRKINVDYASHTPHVEQIRTELLHITAAITAETPTVPWLSTVDGTWIDHPLDTEYWYRNLREPVGFGATIELLQTQGDTIFIEVSASPVLLQAIDDSIAIPTLRRDDGTPTRLLTALAEAHVNGVTIDWATVLGATGSPVDLPTYAFQHQRFWVGDRLHGRTSAEQHRIMLDLVLGHATSVLGHQTPDAVASDRAFKDLGMDSLTAVELRNHLVAETGLRLPATTAFDHPTADDLARRL

SEQ ID NO: 128 - protein, 948 aa, Actinoplanes sp.
EPIAIVSMACRAPGCVTSPEGLWRLVESGTDAIADFPADRGWDLATLYSPDPIGYTSYCLQGGFLDAAADFDAAFFGISPREALGMDPQQRLLLETSWEAIERARIDPRSLRGRDVGVYVGGATQGYGVGAVDQQRDNVITGSSISLLSGRLSYALGLEGPGVTVDTACSSSLVALHLASQALRQRECSMALVSGVSVIPTPDVFVEFSRQRGLASDGRCKSFSAAADGTIWAEGVGVLVLERLSEATRLGHEVLAVIRGSAVNSDGASNGLTAPNGASQQRVIRQALASAGLNAADVDTVEAHGTGTKLGDPIEAEAILATYGQDRSSPVWLGSLKSNIGHSMAASGVLGVIKMVEAMRHARLPRTLHVDEPSPHVDWASGDVALLTENQPWPDGARPRRAGVSSFGLSGTNAHVVLEQHRAPAVPVAAETVADDVPLPLLLSARHPKALRDQAARLHAALAEAPGWRPLDVGYSLATTRSAFAHRAVAVGSGRELLRALAKLAEGAAWPALVTGTAKAGRVAFLFDGQGTQRLGMGRVLHDRFPVFARAWDTVSARFDQHLDHSLTDVYLGRDTSAAALADDTLYAQAGIFTMEVALFELLAEWGVRPDLVSGHSIGEVAAAYAAGLFSLEDAATLIVARGRALRQMPPGAMLALRASEDQVRELLDRTGADLDVAAVNSPVSVVVSGDPDAVAAFRAEWEASERDARALNVHHAFHSRRVDAVLDEFRAVLGTLTFRTPALPVVSTVTGRLAGPAEMSTPEYWLRQIRRTVRFQDAVRELSGQGAGTFVEIGPSGALAAAGLECVDASFHAVQRPRSPEDACLLTAVAELHAGGTAVDWAKVLAGGRATDLPVYPFQHETYWIPPASPPADTRTMLEVVHEEAALVLGVTDPRVILDDSSFLDLGFDSLSAMRLGNQLSAVTGLDLPPSLLFEHPTVGELAAHLD

SEQ ID NO: 129 - protein, 886 aa, Actinoplanes sp.
EPLAIVGMAARFPGGVASADDLWRLVVSGGDAIGGFPADRGWDLEELYDPDPAATGRSYVREGGFLNDATTFDASFFRIGPREAKAMDPQQRLLLETSWEAFEHAGIRPETLRGTATGVFAGISLQDYGVLAGSDPELEGYAGTGNAPSVLSGRLSYFYGLEGPAVTIDTACSSSLVALHLAGQSLRRDECTLAVVGGVTVMPSPNVFVEFSRQRGLAPDGRCKPFAAAADGTGWSEGVGVLVVERLSDARRNKRRILAVVRGSAVNQDGASSGLTAPNGPSQQRVIRSALAAAGLTAGDVDVVEAHGTGTTLGDPIEAQGVLATYGDRSGAPVRLGSVKSNLGHTQAAAGIAGVIKMVQALRHGVMPRSLHIDEPSPHVDWTAGRVELLTSNLPWPTSERPRRAAVSSFGISGTNAHVILEQAFPATEPEPSFTPVVSGPALPLVFSARDSGALATRTHLSDGPGVAYALATSRSMFDHRSVRIGDMTVTGVATTDPEVVFVFPGQGTQWAGMGRALMDASPVFAERMNECAAALEPYLDLWEAIDTPDQVETLQPASWAVMVSLAAVWQAAGVRPAAVIGHSQGEIAAACVAGSLSLADAAAVVALRSKAIAASLGKGAMASIPLPVEEIELIDEVWVAALNGPSSTVVAGAPDAVEQVRARYDGRRIAVDYASHTPHVEALRGQVVSVPSQAPDIPWFSTVDSEWVEGPLDDDYWFRNLRQPVQFGPAAARFDDAVFVEVSARPVLIPALDASVTVPSLRRDDGGPERMLASLAQAFVAGVAVDWTTIVPPAPFVDLPTYPFQGERFWIDLDDVLAVVRDCAATVLGHTDPAAIAPDRPFKDLGFDSLAAVQLRNHLLTVTGVRLSATAVFDFPTPAVLAGEV

SEQ ID NO: 130 - protein, 859 aa, Actinoplanes sp.
EPIAVVGMACRLPGDVASPEDLWRLVAEGRDAVGPFPADRGWELGEAAYARVGGFVTGATGFDAGFFGISPREALAMDPQQRLLLEVAWEAFERAGIAPDALRGSDTGVFVGTYGQGYGELAVDGDAEGYVGIGNSGSVVSGRVSYFFGLEGPAVTVDTACSSSLVALHQAAQALRQGECSLALVGGVTVMSSPLIFQEFARQGGLAADGRCKAFADGADGTGWGEGVGVLVVERLSEAQRRGHTVLAVVRGSAVNQDGASNGLTAPNGPSQQRVIRSALASAGLGFGDVDLVEAHGTGTALGDPIEAQALLATYGSAGTPVWLGSLKSNIGHTQAAAGVAGVIKAVEAMRHGVLPQTLHADQPSSHVDWTAGAVELLTANRPWDSAGRPRRAAVSSFGISGTNAHVILEEFSSAPVSPEPGAGAAPLLLSARSAAALAEFESRVAALRPSRDLAATLAGRVFFDHRAVVLPGGEVVRGRVGDAPVVFVFAGQGSQRSDMASRLAGEFPLFAAAHERVWSLLDVDESLDVDQTGFAQPALFAYEVALAELLGVRPDAVIGHSVGELAAAYVAGALSLEDACRLVSARARLMQALPPGGVMVSVRVSEEAARAVLRDGVELAAVNGPRAVVLSGDEGAVLAAAAELGEFRRLRTSHAFHSALMEPMLEEFRAVASSVEFGEPEIALSFVPSADYFVRQVRETVRFGEQVAAFEPGTLFVEVGPDGSLSRLTGGVNAAEPLTALAHLWAHGAVVDWTPYTSDGRLDTAPTYPFQPERYWPEQRRRRARRGDSLALVIATAAAVLGHPEGTDIPADTPFQSLGFDSLSAVDLRNQLAHATGVRLSPTAVFDHPTPRALAERL

SEQ ID NO: 131 - protein, 899 aa, Actinoplanes sp.
DPIAIVGMACRYPGGVATADDLWDLVAEGGDAVGPFPADRGWDLAGLYDPDPEAAGKSYVREGGFLGGAADFDAAFFGISPREALAMDPQQRLLLETAWEAFEHAGIDPLDLRRSDTGVFVGTMAQEYGGLVTDSAHGLEGWIGTGNSQSVMSGRLSYFFGLQGPAVTIDTACSSSLVALHQAAQALRSGECSLAVVGGVTVMSSPRTFQEFSRQRGMAPDGRCKPFAAAADGTGWSEGVGVLVVERLSEARRNGHAVLAVVRGTAVNQDGTSNGLTAPNGPAQQQVIRAALERAGLGVGDVDVVEAHGTGTALGDPIEAQAILDTYGSRTTGEPVRLGSVKSNLGHTQAAAGVAGVIKMVQAMRHATMPRSLHIDEPSPHVDWASGAVELLTAERGWPATDRPRRAAVSSFGISGTNAHVIVEGVTEPEPSREAAPSGPLPLMLSAPTAEALAEQETRLRRFRADRPDADERDIAVTLAGRTGFAHRTVLIGELSVSGVAVADRRVVFVFPGQGTQWAGMGRDLMDASPVFAERMNECAAALEPYLDLWEAIDTPDRVETLQPASWAVMVSLAAVWQAAGVRPAAVIGHSQGEIAAACVAGSLSLADAAAVVALRSKAIAASLGKGAMASIPLPAEEIELIDEVWVAALNGPSSTVVAGAPDAVEQVRARYDGRRIAVDYASHTPHVEALRGQVVSVPSQAPDIPWFSTVDSGWVEGPLDDDYWFRNLRQPVQFGPAAARFDDAVFIEVSARPVLIPVLEDAVTVPTLRRDDGGIGRLHASVAQAWTAGADVDWAALLPAGGRRIALPPYAFTHERFWPRRPAAAGQDLLTVVRTAAATVLGHRDAARVPADRAFKELGFDSLSAVQLRNELLTATGVRLSATAVFDHPTAAALAEAL

SEQ ID NO: 132 - protein, 873 aa, Actinoplanes sp.
EPIAIVGMACRLPGDVSSPDELWELVESGRDAIGPFPADRGWNLSTLFDPDPDAPGKSYVREGGFLTGAGLFDADFFGISPREALAMDPQQRLLLEVAWEAFERAGIAPDALRGSDTGVYVGTYAQGYGELAAATAGEGFVGIGNSGSVVSGRVSYFLGLEGPAVTVDTACSSSLVALHQAAQALRLGECSLALVGGVTVMASPLMFQEFSRQRGLSPDGRCKAFAEGADGTGWGEGAGVLVVERLSEARRRGHTVLAVVRGSAVNQDGASNGLTAPNGPSQQRVIRAALAAAGLTFGDVDVVEGHGTGTALGDPIEAQALLATYGAAGSPVRLGSLKSNIGHTQAAAGVAGVIKMVQAMRHGVMPRTLHVDQPSSHVDWSAGAVELLTANRTWEAPGRPRRAAVSSFGISGTNAHVILEGVPAPEPAAGSAETAPLLLSARTVPALNDFEARVSARPSSPDLAATLSRRVFFDHRAVVLPGGEVVRGRVGDAPVVFVFAGQGSQRADMASRLAGEFPVFAAAHERVWSLLDVDEGLAVDQTGLAQPALFAYEVALAELLGVRPDAVIGHSVGELAAAYVAGALSLEDACRLVSARARLMQALPPGGVMVSVRVSEEAARAVLRDGVEIAAVNGPRAVVLSGDEDAVLAAAAELGEFRRLRTSHAFHSARMEPMLEEFRAVASSVVFGEPEIAMSFVPSADYFVRQVRETVRFGEQVASFDPGSLFVEVGPDGSLSRLTGGVSAAEPMKALAYLWVRGVGVDWAPYVGGGRLDLGAPTYPFQREGFWPTREALAQLPPARRGRALLDLVQNRVAKTLGLVRPADPGRAFTDLGFTSLTALELRNSIAEETGLPLPASLVFDHPNARALAAYLD

SEQ ID NO: 133 - protein, 898 aa, Actinoplanes sp.
EPLAIVGMACRLPGGISSAEELWRLVAEGGDAIGPFPGDRGWDIDALYDPDPDAAGRTYTRSGGFLPGAGDFDAAFFGISPREAQAMDPQHRQLLETSWEALEHAGIDPAGLRGRDVGVFAGFSGQDYIAEMGVGPAEAGGYQVTGRAASVLSGRLSYFYGFEGPAVTVDTACSSSLVALHLAGQSLRDGESSLALVGGVTVMSSPGLFVEFSRQRGLAPDGRCKAFSVDADGTGWSEGVGVLVVERLSDARRNNHQILAVVRGSAVNQDGASNGLTAPNGPSQQRVIRQALAQSGLSVGDVDVVEAHGTGTALGDPIEAQAVLATYGSRTGGEPVRLGSLKSNIGHTQAAAGIASLIKMVQSIRYGVMPRTLHVSEPSPLVDWAAGRVELLTSDVPWPEGVRRAAVSAFGISGTNAHVILEEAPAPAEAVPSIRPVVSGPELPLVFSARDADALAAQSRLTDGPGVAHALVTARTVFDHRSVRMGDVTVTGVATPDPEVVFVFPGQGTQWPGMGRDLMAASPVFADRMNECALALSPYLDLWAAIDAPDRVETLQPASWAVMVSLAAVWQAAGVQPAAVIGHSQGEIAAACVAGSLSLADAAAVVALRSRAIASLAGKGAMASIPLPAEEIELVDEVWVAALNGPSSTVVAGTPDAVEQIRSRYDGRRIAVDYASHTPHVEALRGQVVSVPSQSPAVPWFSTVDSAWVEGPLDEDYWFRNLRQPVQFGPAAAGFDNAVFVEVSARPVLIPALDASVTVPSLRRDDGGPERMLASLAQAFVAGVAVDWTTIVPPAPHVDLPTYPFRRQRHWIDMERLGQLPPGDRDRFLLDLVRDAAAAVLGHGSRETVPASAAFKELGFDSLIAVQLRNAVAAATGVSLPATVTFDHPTPQALAVLL

SEQ ID NO: 134 - protein, 920 aa, Actinoplanes sp.
EPLAIVGMACKFPGGVDSPERLWEMVEAGEDVIGPFPDDRGWDVDGGYDPDPEKAGSWYARAGGFLAGAADFDAAFFGINPREALAMDPQQRLLLEVAWEAFERSGIAPDSLRGTDTGVFVGTFGQGYGRLVAAGAPGLEAYSGTGNTGSVASGRLSYVFGLEGPAVTVDTACSSSLVALHQAGRSLQSGECSLALVAGVTVMSTPDSFVEFSRQRGLSPDGRCKAFAAAADGTGFSEGAGVLVVERLSDARRNNHQILALVRGSAVNQDGASNGLTAPNGPSQQRVITAALTDARLTTTDIDLVEAHGTGTTLGDPIEAQAILATYGNRTTGNPVHLGSVKSNLGHTQAAAGIAGVIKAIQAIRHTTMPKSLHIDQPSPHVDWTSGRVELLTSNQPWPATDRPRRAAVSSFGVSGTNAHVILEEQTPVEEPPPASAGPVPLALSARTPEALTAQEKAVRGLPDGDRRRAAPALALGRAALPHRAVLLGDSVIRGTASADDGRPVFLFPGQGAQWAGMGRELMAASPVFAERMRECAVALAGFVDWDLFAVLDDAEALRRTEIVQPASWAMMVSLAALWESWGVRPAAVVGHSQGETAAAVVAGAIGLRDGARLSATRSRVLALLAGHGALASIALPAGEVEVVDGVSVAAVNGPRATLISGDPAGVEAVTARYEASGVRVRRIPADVASHSPHVERAEETLLAALAGIEARVPGVPWLSTATGDWITEPVDERYWYRNLRSPVLFHPAITTLRDRGHRLFLEISTHPQLLPAMEDDLLTVGSLRRDDGDLDRMHAALAEAWAAGADVDWRAFLGSGPVRALDLPTYPFQRRRFWPEAGALPPAERERALVEIVRDQAAAVLGDPDAGALTPGTAFRDLGFDSLTAVQLRNHLATATGLTLPATVIFDHPTPRALATFLD

SEQ ID NO: 135 - protein, 883 aa, Actinoplanes sp.
EPLAVVGMACRLPGGVSSPDQLWDLVVSGGDGIGPFPGDRGWATDEIYDPDPDASGKTYVREGGFLDSAGDFDAAFFGISPREALAMDPQQRLLLETSWEAFEHAGIDPAGLRGGDTGVFVGGFTQAYGVGTADLEGYAATGTVGSVLSGRLSYFYGFEGPAVTIDTACSSSLVALHQAGQALRQGECTLAVVGGVTVMPTPVVFQEFSRQRGLAADGRCKAFADEADGTGFAEGAGVLLVCRLSDARRDGRRILAVVRGSAVNQDGASNGLTAPNGPSQQRVIRAALASARLGPGDVDLIEGHGTGTTLGDPIEAQALLATHGSGASPVRLGSLKSNIGHTQAAAGVAGVIKVIQALRHGLMPRTLHVGTPSSQVDWSAGNVELLTSNLPWPATDRPRRAAVSSFGISGTNAHVILEEAPAPAAVPSITPVVSGPALPLVFSARDSGALAARTRLTDGPGVAFALATSRSMFDHRAVRIGDLSVSGVAVADRRVVFVFPGQGTQWAGMGRALMDASPVFAERMNECAAALSPYLDLWEAIDAPDRVETLQPASWAVMVSLAAVWQAVGVEPAAVIGHSQGEIAAACVAGSISLPDAAAVVALRSKAIASLAGKGAMASIPLPPDQIDLIDQVWIAALNGPSSTVVAGSPEAVEQVRARYDGRRIAVDYASHTPHVEALRGQVVSVPSQAPDIPWFSTVDSAWVEKPLDGDYWFRNLRQPVQFGPAAARFDDAVFIEVSARPVLIPALDTSVTVPSLRRDDGGPERMLASLAQAFVAGVAVDWTTIVPPAPFVELPTYPFQRRRYWIDSSEEALRDLVREQAAAVLGYPDPSRITPGVAFRDLGFDSLTAVQLRNALSAATGLRLSATVAFDHPTPAALAAAL

SEQ ID NO: 136 - protein, 872 aa, Actinoplanes sp.
EPIAIVGMACRLPGDVSSPDELWDLVESGRDAIGPFPADRGWNLDELYDPDPDATGRSYVREGGFLAGAADFDAEFFGINPREALAMDPQQRLVLEVAWEAFERAGIAPDSLRGTDTGVFLGAFAGGYLTLVNGAADLEGYAGTGNSVSVLSGRLSYVLGLEGPAVTVDTACSSSLVALHQAAQALRQGECSLAVAGGVTVMSTPDSHVEFSRQRALSPDGRCRAFADGADGTGWSEGAGVLVVERLSEARRRGHTVLAVVRGSAVNQDGASNGLTAPNGPSQQRVIRSALASAGLGFGDVDLVEGHGTGTALGDPIEAQALLATYGSAGTPVWLGSLKSNIGHTQAAAGVAGVIKAVEAMRRGVMPRTLHVDAPSSHVEWSSGSVELLTANRPWDGVGRPRRAAVSSFGISGTNAHVILEGVPAPEPAGTGQAPLLLSARSVSALAEFESRIAGLVPSRDLAATLAGRAFFDHRAVILPDGDVVRGRAGGAPLVFVFAGQGSQRADMASRLAEEFPAFAAAHERVWSLLDVDEGLDVDQTGLAQPALFAYEVALAELLGVRPDAVIGHSIGELAAAYVAGALSLEDACRLVSARARLMQDLPSGGAMVSVRVSEEAARAVLRDGVEIAAVNGPQAIVLSGDEDAVLAAAAELGEFRRLRTSHAFHSGRMEPMLEEFRLVASSVVFREPEIAMSFVPSADYFVRQVRETVRFGEQVASFDAGAVFVEVGPDGSLSRLTGGVSAAEPLTALAYLWVRGVGVDWAPYVGGGRLDLGAPTYPFQRERYWVRPRLAGRTTDERDALLISLVRDDVASVLGHPDRRRLATDRPLLELGFDSLTALRLRNRLAAATDIALPATLIFDYPNIQAIAVHL

SEQ ID NO: 137 - protein, 898 aa, Actinoplanes sp.
EPLAVVGMACRYPGGVASADDLWRLVTAGGDAIGPFPDDRGWELESLVDPDPEAVGRSTTGQGGFLADAAGFDAAFFGISPREATAMDPQQRLLLEVSWAALEHAGLRADALRGSATGVFMGSNGQDYAGLLAGAPELEGWIGTGVSASVVSGRLSYFYGFEGPAVTVDTACSSSLVALHLAAQSLRTGESSLALVGGVTVMTSPTVFRSFSRQRGLAPDGRCKAFSAGADGTGWSEGVGVLVVERLSDARRNNHQILALVRGSAVNQDGASNGLTAPNGPSQQRVITAALTDARLTTTDIDLVEAHGTGTTLGDPIEAQAILATYGNRTTGNPVHLGSVKSNLGHTQAAAGIAGVIKAIQAIRHTTMPKSLHIDQPSPHVDWTSGRVELLTSNQPWPATDRPRRAAVSSFGVSGTNAHVILEEAPAPAEAVPPIRPVVSGPALPLVFSARDSGALATRTHLSDGPGVAYALATSRSMFDHRSVRIGDMTVTGVATTDPEVVFVFPGQGTQWAGMGRALMDASPVFAERMNECAAALEPYLDLWAAIDAPDQVETLQPASWAVMVSLAAVWQAAGVRPAAVIGHSQGEIAAACVAGSITLQDAAAVVALRSKAIAASLGKGAMASIPLPVEEIELIDEVWVAALNGPSSTVVAGAPDAVEQVRARYDGRRIAVDYASHTPHVEALRGQVVSVPSQTPAVPWFSTVDSEWVEGQLDDDYWFRNLRQPVQFGPAAARFDDAVFIEVSARPVLIPALDASVTVPSLRRDDGGPERMLASLAQAFVAGVAVDWTTIVPPAPFVDLPTYPFQHERFWIEGRVAAATGAERPRILLEVVLAETATVLGHGGAAAIGPDRAFQDLGFDSLTAVELRNRLAAATALTLPTTLVFNHPTPEALAAHL

SEQ ID NO: 138 - protein, 944 aa, Actinoplanes sp.
ELVAIVGMACRLPGDVASPEDLWRLVAEGRDAVGPFPADRGWNLGTLDDPDAAGRSYVKEGGFLAGAAHFDPGFFGIGPREALGMDPQQRILLEIAWESLERARIAPGSLRGSETGVYVGAAAQGYGVDAPLEGNLLTGGSTSAMSGRVAYSLGLHGPAVTIDTACSSSLVALHLAAQALRNGECTLALAGGVAVMASPVLFTEFSRQRGLAPDGRCKAFAAAADGTGWSEGAGLVVLERLSDAERHGHPVLAVIRGSAVNSDGASNGLTAPNGTAQRRVIRSALRAAGLGAGDVDVVEAHGTGTTLGDPVEADALIATYGQRPGMPPVRIGSLKSNIGHTVAAAGVAGVIKMVEAMRHDTMPRTLHVDRPTPHVDWSAGAAELLTGEQPWPRGDRPRRAAVSAFGLSGTNAHLILEDVAPGAASGAEPPGAADETVPLLLSADDLPAVRDQAARLRAYLLARPELRMRDVAYALATTRTARPHRAAVAATEREFLRELALLAAGDQGPGTQLGEAVPHRRVAFLFDGQGTQRHGMGRALHQRHPVFAAAWDEVCAALDPLLGRGVADVYFAEAGRDLADDPLYTQAGLFALEVALYRLLTSWGVTPDAVAGHSVGEVAAAHVAGVLSLPDAAALLAARGAALRRLPAGAMAAIRASEADTRAVLPPDLDVAAVNGPEMTVVSGAPDAVDRFIAEQAGAGRQVRRLRVGRAYHSRHVDAVLAEFGATLSALTFHEPVLPVVSTVTGRPAGAGDLTTPEYWLRHARRPVRFGAALAALSELGMDSFVEVGPSGSLSSMAGETVAGTFHPMLDRRVPDEIAVAAGELFTAGMVLDWAAVLAGGRTIDLPVYPFRREFYWLGARRYDLMAAAERRDALLDLVRVQVALLLGRADAIGVRDNTSFLDVGLDSLGASRLRNRLAAATGLTLPGGVAFDHPTPARLADHL

SEQ ID NO: 139 - protein, 863 aa, Actinoplanes sp.
EPLAIVGMACRLPGGVSSPEDLWRLVESGTDATSGFPVDRGWADSSMRGGFLDAAADFDAAFFGISPREALAMDPQQRLVLEASWEAFERAGIEPGSVRGSDTGVFMGAFSGGYGAGADLGGFGVTAGAVSVLSGRVSYFFGLEGPAVTVDTACSSSLVALHQAGHALRQGECSLALVGGVTVMSTPDIFAEFSRQGGLASDGRCKAFADTADGTSWSEGVGVLVVERLSDARAKGHQVLAVVRGSAVNQDGASNGLTAPNGPSQQRVIQAALTHAGLTTAEVDVVEAHGTGTTLGDPIEAQAVIATYGRDRERPVLLGSLKSNVGHTQAAAGVSGVIKMVMALQHGVVPRTLHVDEPSRHVDWTAGAVRLATESQPWPDTGRPRRAAVSSFGVSGTNAHVILEGVAEEPAQSEESSELVPLVISAKTPAALTRLEERLRAYLTAESNLSAVASTLAETRSLFEHRAVLLGDDTIKGTAQPNPRVVFVFSGQGSQRAGMGDELAAAFPVFAKIRQQVWDLLDVPDLEVNDTGHAQPALFALQVALFGLLESWGVRPQALIGHSIGELAAGYVSGIWSLEDACTLVSARARLMQSLPPGGAMVAVPVSEQQARAVLTDGVEIAAVNGPSSVVLSGDEEAVLRAAAALDGRSKRLVTSHAFHSARMEPMLDEFRAVAEQLTYRAPRIPMAVGEGPEYWVRQVRETVRFGEQVAAHDGAVFVELGPEGTLARLIDGVAVLDREDEPRAALTALGKLHVRGVRVDWPLTSGRRVDLPTYAFQRERYWATALTPAEREQALLKLVRDSAAVVLGYTDAVPVSGSFKDLGIDSLTAVELRNSLATTTGLRLPATLVFDYPTPATLAARL

SEQ ID NO: 140 - protein, 904 aa, Actinoplanes sp.
EPLAIVGMACRLPGGVSSPEDLWRLVESGTDAIAPFPTDRGWDVEALFDPDPDAAGKSYCVRGGFLDGVADFDASFFGISPREALAMDPQQRLILEASWEAFERAGIDPADARGSDTGVFMGAFTSGYGADLEGFGGTAGALSVLSGRVSYFFGLEGPAVTVDTACSSSLFALHQAGYALRQGECSMALVGGVTVMATPRTFVEFSRQRGLASDGRCKAFGDTADGTGWAEGVGVLVVERLSDAQAKGHRVLAVVRGSAVNQDGASNGLTAPNGPSQQRVIQAALHNARLTPADVDVVEAHGTGTTLGDPIEAQAVIAAYGQGRDEPLLLGSLKSNVGHTQAAAGVSGVIKMVMALQHGVVPRTLHVDEPSRHVDWTAGEVRLVTENQSWPDTGRPRRAGVSAFGVSGTNAHVILEGPPTQPPATAPQEPAPLVISAKTPAALADYEGRLRAYLAATPGTDARALAVTRSLFEHRAVLLGDDTISGAAVTDPRVVFVFPGQGWQWLGMGVALRDSSVVFAERMTECAAALSEFVDWDLFAVLDDPAVVDRVDVVQPACWAVMVSLAAVWQAAGVHPDAVVGHSQGEIAAACVAGAISLRDAARVVALRSRLIGERLGQGAMASVTLPADEISLVDGVWIAAYNGPASTVIAGSPDAVDQMVGDRVRRIAVDYASHSPQVEQIKDELLDITADVGSRTPTVPWFSTVDGSWIEGPLDADYWYRNLRQPVGFHPAVEALRALGETVFVEVSASPVLLPAMDDALTVATLRRDDGTIARMHTALAEAHVHGVNVDWAAVLGVAARHVDLPTYAFQRQRFWADERELASLGPAEREQALRKLVSDTAAGVLGYADPGAVPIKAAFRELGVDSLTAVELRNGLAKATGMRLPATMVFDYPTPHALAARL

SEQ ID NO: 141 - protein, 909 aa, Actinoplanes sp.
EPLAIVGMACRLPGGVSSPEDLWRLVESGTDAISEFPADRGWDVENLYDPDPDAAGKSYCVRGGFLDAAAEFDASFFGISPREALAMDPQQRLILEASWEAFERAGIEPGSVRGSDTGVFMGAFSGGYGADVEGFGATAGAGSVLSGRVSYFFGLEGPAITVDTACSSSLVALHQAGYSLRQGECSLALVGGATVMAKPQSFVEFSRQRGLAADGRCKAFADAADGTGWAEGVGVLLVERLSDAERNGHQVLAVVRSSAVNQDGASNGLSAPNGPSQQRVIRQALANARLTAADVDVVEAHGTGTTLGDPIEAQALIAAYGQDREWPLLLGSLKSNVGHTQAAAGVSGVIKMVMALQHGVVPRTLHVDEPSRHVDWTAGAVRLVTDNQPWPETGRPRRAGVSSFGVSGTNAHVILESPPTQPSGTFKKPAHEPQPLIISAKTPAALADYEDRLGAYLTAAPGVDVPAVAATLAVTRSLFEHRAVLLGDNTVTGTAITDPRVVFVFPGQGWQWLGMGAALRGSSVVFAERMTECAAALSEFVDWDLFAVLDDPAVVDRVDVVQPACWAVMVSLAAVWQAAGVHPDAVVGHSQGEIAAACVASAVSLRDAARVVALRSRLISERLGQGAMASVALPADQIVLADGVWIAAHNGPTSTVVAGSPDAVEQMLGDRVRKIAVDYASHTPHVEQIKTELLGITAGIGSRTPTVPWFSTVDGSWIEGPLDADYWYRNLRQPVGFDAAVGRLRALGATVFVEVSASPVLLPAMDDAVTIATLRRDEGSITRMHTALAEAHVLGVNVDWPTLLGDTDRRALDLPTYAFQRQRYWGDAAGLAPAEREQALLKLVRDSAALVLGYAGGDAVPATDAFKDLGIDSLTAVELRNGLAKATGLRLPATLVFDYPTPQVLAARL

SEQ ID NO: 142 - protein, 867 aa, Actinoplanes sp.
EPLAIVGMACRLPGGVSSPEDLWRLVESGTDATSGFPVDRGWADSSMRGGFLDAAADFDAAFFGISPREALAMDPQQRLVLEASWEAFERAGIEPGSVRGSDIGVFMGAYPGGYGIGADLAGFGATAGAGSVLSGRVSYFFGLEGPAVTVDTACSSSLVALHQAGHALRLGECSLALVGGVTVMATPDTFVEFARQGGLASDGRSKAFADSADGAGFSEGVGVLLVERLSDAQRHGHRVLAVVRGSAVNQDGASNGLTAPNGPSQQRVIQAALAHAGLAPHEVDVVEAHGTGTTLGDPIEAQAVIATYGQDRDEPLLLGSVKSNVGHTQAAAGVAGVIKMVMALRHGVVPQTLHVDEPSRHVDWTAGAVRLLTEKQPWPSTDRPRRAGVSSFGISGTNAHVILEGVAEEPAQSEDSSELVPLVISAKTPAALTQVEERLRAYLTAESNLSAVASTLAETRSLFEHRAVLLDGHAVRGVAESNPRVVFVFSGQGSQRAGMGDELAAAFPVFAKIRGQVWDLLDVPDLDVNDTGHAQPALFALQVALFGLLESWGVRPHALIGHSIGELAAGYVSGIWSLEDACALVSARARLMQALPPGGAMVAVPVSEQQARAVLTDGVEVAAVNGPSSAVLSGDEEAVLRAAAALGGRWKRLATSHAFHSARMEPMLDEFRAVAEQLTYRAPRIPMAVGEGPEYWVRQVRETVRFGEQVAAHDGAVFVELGPDGSLARLIDGIATLDRDDEPRVALTALAELHVRGVDVDWPLTSGRRVDLPTYAFQRQRYWIDRAGRTPAEREQALLKVVRDSAATVLGHADGGSVGAAAAFKDLGVDSLTAVELRNSLAKATGLRLPATLVFDYPTPAAVAVRL

SEQ ID NO: 143 - protein, 900 aa, Actinoplanes sp.
EPLAIVGMACRLPGGVSSPEDLWRLVESGTDATSGFPTDRGWADSSMRGGFLVAAADFDAAFFGISPREALAMDPQQRLVLEASWEAFERAGIEPGTVRGSDTGVFMGAYPGGYGIGADLAGFGATAGAGSVLSGRVSYFFGLEGPAVTVDTACSSSLVALHQAGHALRQGECSLALVGGVTVMATPDLFVEFARQGGLASDGRCKAFGDTADGTGWAEGVGVLLVERLSDAQAKGHRVLAVVRGSAVNQDGASNGLTAPNGPSQQRVIQAALHNARLTPADVDVVEAHGTGTTLGDPIEAQAVIAAYGQGRDEPLLLGSLKSNVGHTQAAAGVSGVIKMVMALQHGVVPRTLHVDEPSSHVDWTAGAVRLVTENQSWPDTGRPRRAAVSAFGVSGTNAHVILESSAAPSPTIPQPPSAEPMPLVISAKTPAALADYEGRLRAYLTAPGVDVPAVAATLAVTRSLFEHRAVLLGGNTVTGTAVADPRVVFVFPGQGWQWLGMGAALRGSSVVFAERMTECAAALSEFVDWDLFAVLDDPAVVDRVDVVQPACWAVMVSLAAVWQAAGVHPDAVVGHSQGEIAAACVAGALSLRDAARVVALRSRLIGERLGRGAMASVSLPADQIVLADGVWIAAHNGPASTVIAGGAGAVDQMVGERVRRIAVDYASHTPDVEQIQTELLDITADVGSQAPVVPWFSTVDGVWVDGPLDRDYWYRNLRQPVGFHPAVEALQALGETVFVEVSASPVLLPAMDDAVTVATLRRDEGSITRMHTALAEAHVLGVNVDWPTVVGDTDRRTLDLPTYAFQHHRYWISAAARLDGLTAAEKHSLLLDIVLANAATVLGHHTVDTIAPDKPFKDLGIDSLTAVELRNGLAKATGLRLPATLVFDYPTPDMAAARL

SEQ ID NO: 144 - protein, 873 aa, Actinoplanes sp.
EPLAIVGMACRLPGGVSSPEDLWRLVESGTDAISDFPTDRGWADAAGAPYSPQGGFVDAAADFDAAFFGISPREALAMDPQQRLVLEASWEAFERAGIEPGTVRGSDTGVFMGAYPGGYGIGADQAGFGTTAGAGSVLSGRVSYFFGLEGPAVTVDTACSSSLVALHQAGHALRQGECSLALVGGVTVMGTPDIFAEFSRQGGLASDGRCKAFGDDADGTGWGEGVGILLVERLSDAQRHSHRVLAVVRGSAVNQDGASNGLTAPNGPSQQRVIQAALAHAGLAPHEVDVVEAHGTGTTLGDPIEAQAVIATYGQDRDEPLLLGSVKSNVGHTQAAAGVAGVIKMVMALRHGVVPRTLHADQPSRHVDWTAGAVRLATENQPWPAIDRPRRAGVSSFGISGTNAHVILEGVAEEPAQSEESSPLMPLVISAKTPAALTRLEERLRAYLAAKPETSLGAVASTLAETRSLFEHRAVLLNGDVVRGVAEPNPRVVFVFSGQGSQRAGMGDEVAAAFPVFAKIRRQVWDLLDVPDLDVNDTGHAQPALFALQVALFGLLESWGVRPDALIGHSIGELAAGYVSGIWSLEDACALVSARARLMQALPAGGAMVAVPVSEQQARAVLTDGVEIAAVNGPSSVVLSGDEEAVLRAAAGLGSRWKRLATSHAFHSARMEPMLDEFRVVAEQLSYKTPRIPVAVGEGPEYWVRQVRETVRFGEHVAAHDGAVFVELGPDGSLARLIDGIATLDRDDEPRAALTALAELHVRGVDVDWPLTSGRRVDLPTYAFQRQRYWTTAGLTRAEREQALLKLVRDTAAVVLGYGDGNAVPVTAAFKDLGVDSLTAVELRNGLAEAIGLRLPATLVFDYPTPATLAVRL

SEQ ID NO: 145 - protein, 871 aa, Actinoplanes sp.
EPLAIVGMACRLPGGVESPDDLWRLVESGTDAITGFPTDRGWPDVTGTSHSQHGGFLHTAADFDAAFFGISPREALAMDPQQRLILEASWEAFERAGINPADAHGTDTGVFMGAFSAGYDADRDDSPATAGAVSVLSGRISYFFGLEGPAMTVDTACSSSLVALHQAGYSLRQGECSMALVGGVTVMATPRTFVEFSRQGGLASDGRCKAFGDTADGTGWSEGVGVLVVERLSDARAKGHRVLAVVRSSAVNQDGASNGLTAPNGPSQQRVIQAALHNAHLTPADVDVVEAHGTGTTLGDPIEAQAVIAAYGQDRDEPLLLGSIKSNVGHTQAAAGVSGVIKMVMALRHGVVPRTLHADQPSRHVDWNAGAVQLVTENQSWPETGRPRRAAVSSFGISGTNAHVILEGVPEQPAQPEPPSERVPLMISAKSTSALSQLEDRLRAYLAARPEASLGAVASTLATRSLFEHRAVLLDGQVVKGVAEPNPRVVFVFSGQGSQRAGMGDELAAAFPVFAKIRGQVWDLLDVPDLDVNDTGHAQPALFALQVALFGLLESWGVRPDALIGHSIGELAAGYVSGIWSLEDACTLVSARARLMQALPAGGAMVAVPVSEQQARAVLTGGVEIAAVNGPSSVVLSGDEGAVLRAAAALGGRWKRLATSHAFHSARMEPMLDEFRAAAEQLTYQTPRIPMVVGDGPDYWVRQVRETVRFGEQVAAHDGAVFVELGPDRSLARLIDGIATLDRDDEPRAALTALAELHVRGVDVDWPHDGQLVDLPTYAFQRERYWATALAALPLAEREQALLAVVSDNAAVVLGYAEGRDVTQTAAFKDLGVDSLTAVELRNTLAKATGLRLPATIVFDYPTPDTLAARL

SEQ ID NO: 146 - protein, 878 aa, Actinoplanes sp.
EPLAIVGMACRLPGGVSSPEDLWRLVESGTDAISRFPDDRGWDVEGLFDPDPDAPGKSYSVEGGFLDAVADFDAAFFGISPREALAMDPQQRLVLEASWEAFERAGIEPGSVRGSDTGVFMGAYSGGYGIGADLPGLGVTAGAVSVVSGRVSYFFGLEGPAVTVDTACSSSLVALHQAGHALRRRECSLALVGGVTVMATPFGFVEFSRQRGLAADGRCKAFADTADGTSWSEGVGVLVVERLSDARANGHQVLAVVRGSAVNQDGASNGLTAPNGPSQQRVIQAALAHADLAPHEVDVVEAHGTGTRLGDPIEAQAVIATYGQGRDEPLLLGSIKSNVGHTQAAAGVSGVIKMVMALRHGVVPQTLHVDEPTQHVDWTAGAVRLATENQPWPDTGRPRRAGVSSFGVSGTNAHVILEGVAEEPAQSEESSELVPLVISAKTPAALTRLEERLRAYLSAESNLSAVASTLAETRSLFEHRAVLLGDDTIKGTAQPNPRVVFVFSGQGSQRAGMGDELAAAFPVFARIRRQVWDLLDVPDVSVDDTGFAQPALFALQVALFGLLESWGVRPDALIGHSIGELAAGYVSGIWSLEDACTLVSARARLMQALPAGGAMVAVPVSEQQARAVLTGGVEIAAVNGPSSVVLSGDEEAVLRAAAALGGRSKRLVTSHAFHSARMEPMLDEFQAVAEQLTYQAPRIPMAVGDGPDYWVRQVRETVRFGDQVAAQDGAVFVELGPDRSLARLIDGIATLDRDDEPRAALTALAELHVRGVDVDWPLTSGRRVDLPTYAFQRQRYWIDSALTPAEREQALLKVVRDSAAVVLGYTDAVPVSGSFKDLGIDSLTAVELRNSLAKVTGLRLPATLVFDYPTPATLAARL

SEQ ID NO: 147 - protein, 904 aa, Actinoplanes sp.
EPLAIVGMACRLPGGVESPDDLWRLVESGTDAITGFPTDRGWPDVTGTSHSQHGGFLHTAADFDAAFFGISPREALAMDPQQRLILEASWEAFERAGINPADAHGTDTGVFMGAYSGGYGIGADLAGFGATSGATSVLSGRVSYFFGLEGPAITVDTACSSSLVALHQAGHALRQGECAMALVGGVTVMATPDIFVEFSRQRGLAADGRCKAFADAADGTGWAEGVGVLLVERLSDAERNGHRVLAVVRSSAVNQDGASNGLTAPNGPSQQRVIQAALHNARLTPADVDVVEAHGTGTTLGDPIEAQAVIAAYGQGRDEPLLLGSLKSNVGHTQAAAGVSGVIKMVMALQHGVVPRTLHVDEPSSHVDWTAGAVRLATENQSWPDTGRPRRAAVSAFGVSGTNAHVILESSAAPSPTIPQPPSAEPMPLVISAKTPAALADYEDRLRAYLTNPGVDVPAVAATLAMTRSLFEHRAVLLGGNTVTGTAVADPRVVFVFPGQGWQWLGMGAALRGSSVVFAERMTECAAALSEFVDWDLFAVLDDPAVVDRVDVVQPACWAVMVSLAAVWQAAGVHPDAVLGHSQGEIAAACVAGAISLQDAARVVALRSQAISGLSGKGAMASIALPADQIALPDGAWIAAHNGPASTVVAGSPDAVEQMLGDRVRKIAVDYASHTPHVEQIQTELLDITAGIGSRTPTIPWFSTVDGMWVDGPLDRDYWYRNLRQPVGFHPAVEALQALGETVFVEVSASPVLLPAMDDAVTVATLRRDEGSITRMHTALAEAHVLGVNVDWPTLLGDTGRRTLDLPTYAFQHHRYWINGSRLIGRTTAEQHRLMLAFVLGNVASVLGHGSADAIAADKPFKDLGMDSLTSVELRNSLAKATELRLPATIVFDHPTADALAAHL

SEQ ID NO: 148 - protein, 947 aa, Actinoplanes sp.
EPIAIVSMACRVPGGVTSPEGLWRLVESGTDAISAFPGDRGWDIANLYSPDPDAPGKSYSVQGGFLDGAAAFDASFFGISPREALGMDPQQRVLLETAWEAVERARIDPRSLRGRDVGVYVGGAAQGYGLGAAEAHRDNLITGGSISLLSGRLSYALGLEGPGLTVDTACSSSLVALHLAAQALRQGECSLALVSGVSVMPTPDVFVEFSRQRGLASDGRCKSFAASADGTSWSEGVGVLVLERLSEARRLGHQVLAVVRGTAVNSDGASNGLTAPNGAAQQRVIRQALANAGLSTADVDAVEAHGTGTTLGDPIEAEAILATYGKDRSTPVWLGSLKSNIGHTMAASGVLGVIKMVEAMRHGVLPRTLHVDEPSPHVDWAAGEVALLTENQTWPGDVRPRRAGVSSFGLSGTNAHVVLEQDEAPAAPVTTKESGPLPWVLSAQSPKALRQRAGQLATALAEDSTWHPLDVAYSLATTRSDFAHRAVVVGADRELLRTLGKVADGAGWPGLTTGTAKARRVAFLFDGQGTQRLTMGQGLYGSFPAFARAWDTVSAEFGKHLDHPLADVYFDGSGGAATADLVDDPLYAQAGIFAVEVALVELLAEWGVRPDVVTGHSIGEAAAAYTAGMLSLSDVTTLIVARGAALRSAPPGAMLALRAGEQEVRNFLDGTGAALDLAAVNGPAAVVVSGAPDAVTDFASAWTASGREARRLKVRRAFHSRHVEGVLDDFRTALESLSFRTPLLPVVSTVTGRLIDPAEMGTPEYWLDQVRQPVRFQEAVQELAGQGVGTFVEVGPSGTLASAGMECLDGDASFHALLRPRSAEDVGVLTALAELHAGGTAIDWPTVLAGGRPMDLPVYPFQHQSYWLVSTDEPRTTLELVHLEVARVLGITDPDTVLDDASFLELGFDSLGGVRLRNRLAQVTGLTLPPTLLFDHVTPAALAAELD

SEQ ID NO: 149 - protein, 899 aa, Streptomyces rapamycinicus
EPLAIVGMACRLPGGVSSPEDLWRLVESGTDAISGFPADRGWDVENLYDPDPEAAGKSYCVQGGFLDSAGGFDASFFGISPREALAMDPQQRLVLEASWEAFERAGIEPGSLRGSDTGVFMGAYPGGYGVGADLGGFGATAGAVSVLSGRVSYFFGLEGPAVTVDTACSSSLVALHQAGYALRQGECSLALVGGVTVMATPQSFVEFSRQRGLASDGRCKAFADAADGTGWAEGAGVLLVERLSDAQAKGHQVLAVVRGSAVNQDGASNGLSAPNGPSQQRVIRAALSNAGLSTAEVDVVEAHGTGTTLGDPIEAQALLATYGQDREQPLLLGSVKSNLGHTQAAAGVSGVIKMVMALQHGLVPRTLHVDEPSRHVDWTDGAVALVTENQPWPDMGRPRRAGVSSFGISGTNAHVILESAPPTQAVDDVPPAEAPVVASELVPLVISARTLPALVEYEDRLRAYLAASPGVDVRGVASTLAVTRSVFEHRAVLLGDDTVTGTTVSDPRVVFVFPGQGSQRAGMGEELAAAFPVFARIHQQVWGLLDVPDLEVNETGYAQPALFALQVALFGLLESWGVRPDAVVGHSVGELAAGYVSGLWSLEDACTLVSARARLMQALPPGGVMVAVPVSEDEARAVLGEGVEIAAVNGPSSVVLSGDETAVLQAAAALGKSTRLATSHAFHSARMEPMLEEFRTVAERLTYQTPRLAMAAGDRVTTAEYWVRQVRDTVRFGEQVASYEDAVFIELGADRSLARLVDGVAMLHTDHEAQAAISALAHLYVNGVTVDWTALLGDAPATRVDLPTYAFQHQRYWLEGWLAALAPEERAKALLKVVRDTAATVLGHADARTIPVTGAFRDLGIDSLTAVELRNGLAKVTGLRLPATLVFDYPTPAVLAARL

SEQ ID NO: 150 - protein, 924 aa, Streptomyces rapamycinicus
EPLAIVGMACRLPGGVSSPEDLWRLVESGTDAISGFPADRGWDAESLFDPDPAVGKSYCVEGGFLDSAASFDAGFFGISPREALAMDPQQRLIMEVSWEAFERAGIEPGSVRGSDTGVFMGAYAGGYGAGADLGGFAATASATSVLSGRVSYFFGLEGPAITVDTACSSSLVALHQAGYALRQGECSLALVGGVTVMATPQSFVEFSRQRGLASDGRCKAFADSADGTGWAEGVGVLLVERLSDAQAKGHQVLAVVRSSAVNQDGASNGLSAPNGPSQQGVIQAALSNAGLAAHEVDVVEAHGTGTTLGDPIEAQAVIATYGQDRERPLLLGSLKSNIGHAQAASGVSGVIKMVMALQHNTVPRTLHVDEPSRHVDWAAGAVELVRENQPWPGTDRPRRAGVSSFGVSGTNAHVILESAPPAQPAEEAQPVETPVVASDVLPLVISAKTQPALTEHEDRLRAYLAASPGVDTRAVASTLAVTRSVFEHRAVLLGDDTVTGTAVSDPRVVFVFPGQGWQWLGMGSALRDSSIVFAERMAECAAALREFVDWDLFTVLDDPAVVDRVDVVQPASWAMMVSLAAVWQAAGVRPDAVIGHSQGEIAAACVAGAVSMRDAARIVTLRSQAIAGLAGRGAMASVALPAQDVELVDGAWIAAHNGPASTVIAGTPEAVDHVLTAHEARGVRVRRITVDYASHTPHVELIRDELLDITSDSSSQAPVVPWLSTVDGSWVDSPLDVEYWYRNLREPVGFHPAVGQLQAQGDTVFVEVSASPVLLQAMDDDVVTVATLRRDDGDATRMLTALAQAYVHGVTVDWPAILGTTTTRVDLPTYAFQHQRYWVEWLAALAPAEREKALLKVVCDSAAVVLGHADARTIPVTGAFKDLGVDSLTAVELRNSLVKATGLRLPATMVFDYPTPTALAARLD

SEQ ID NO: 151 - protein, 928 aa, Streptomyces rapamycinicus
EPLAIVGMACRLPGGVSSPEDLWRLVESGTDAVSGFPTDRGWDVEGLFDPDPDAAGKSYRAEGGFLDTAAGFDAGFFGISPREALAMDPQQRLLLEVSWEAFERAGIEPGSVRGSDTGVFIGAFPVGYGAGAAREGYGATAAPNVLSGRLSYFFGLEGPAITMDTACSSSLVALHLAAQALRNGECSMALAGGVTVMATPEVFTEFARQRGLASDGRCKAFADSADGAGFSEGAGLLLVERLSDARRNGHQVLAVVRGSAVNQDGASNGFTAPNGPAQQRVIRQALANAGLTTAEVDVVEAHGTGTTLGDPIEAQAVIATYGQDREQPLLLGTLKSNVGHTQAAAGVSGVIKMVMALQHSTVPRTLHVNEPSRHVDWSAGAVELVTENQSWPVTGRPRRAGVSAFGVSGTNAHVVLESAPPAQSVNNAQPVATPVVASELVPLVISAKTLPALTEHEDRLRAYLAASPGADMRAVGSTLALTRSVFEHRAVLLGHDTVTVTGTGTAVSNPRVVFVFPGQGWQWLGMGSALRGSSVVFAERMAECAAALSEFVDWDLFAVLDDPAVVDRVDVVQPASWAVMVSLAAVWQAAGVRPDAVIGHSQGEIAAACVAGAVSLRDAARIVTLRSQAIAGLAGRGAMASVALPAHEIELVDGAWIAAHNGPASTVVAGAPEAVDRVLAVHEARGVRVRRIAVDYASHTPHVELIRDELLDITAGIGSQAPVVPWLSTVDGTWVEGPLDVEYWYRNLREPVGFDSAVGQLRAEGDTVFVEVSASPVLLQAMDDDVVTVATLRRDDGDATRMLTALAQAFVEGVTVDWPAILGTATTRVDLPTYAFQHQRFWAEGWLARLAPVEREKALLKLVCDGAATVLGHADASTIPATAAFKDLGIDSLTAVELRNSLTKATGLRLPATLVFDYPTPTALAARL

SEQ ID NO: 152 - protein, 893 aa, Streptomyces rapamycinicus
EPLAIVGMACRLPGGVSSPEDLWRLLESGTDAVSGFPTDRGWDVENLFGPAAGDSYRLQGGFLDAAAGFDASFFGISPREALAMDPQQRLVLEVSWEAFERAGIEPGSVRGTDTGVFMGAYPGGYGIGADLGGFGATASAVSVLSGRVSYFFGLEGPAITVDTACSSSLVALHQAGYALRQGECSLALVGGVTVMATPQTFVEFARQGGLAGDGRSKAFADSADGAGFSEGVGVLLVERLSDAQAKGHQVLAMLRSSAVNQDGASNGLTAPNGPSQQRVIQAALSNAGLAAHEVDVVEAHGTGTTLGDPIEAQALLATYGQDREQPLLLGSVKSNLGHTQAAAGVSGVIKMVMALQRGFVPRTLHVDEPSRHVDWSAGAVALVTENQPWPDMGRARRAGVSSFGISGTNAHVILESAPPTQPADNAVIERAPEWLPMVISARTQSALTEHEGRLRAYLAASPGVDMRAVASTLAMTRSVFEHRAVLLGDDTVTGTAATDPRVVFVFPGQGSQRAGMGEELAAAFPVFARIHQQVWDLLDVPDLEVNETGYAQPALFALQVALFGLLESWGVRPDAVVGHSVGELAAGYVSGLWSLEDACTLVSARARLMQALPAGGVMVAVPVSEDEARAVLGEGVEIAAVNGPSSVVLSGDEAAVLQAAEGLGKWTRLATSHAFHSARMEPMLEEFRTVAEGLTYRTPQVSMAAGDQVTTTEYWVRQVRDTVRFGEQVASYEDAVFVELGADRSLARLVDGVAMLHGDHEAQAAVSALAHLYVNGVTVDWPALLGDAPATRVDLPTYAFQHQRYWLEGRWLAALAPEERAKALVKVVCDSAATVLGHADVDSIPVTAAFRDLGVDSLTAVELRNSLTKATGLRLPATLVFDYPTPGALAARL

SEQ ID NO: 153 - protein, 901 aa, Streptomyces rapamycinicus
EPLAIVGMACRLPGGVSSPEDLWRLVESGTDAISGFPTDRGWDVENLSDPDAAGKSYCVEGGFLATAANFDASFFGISPREALAMDPQQRLVLEVSWEAFERAGIEPGSVRGSDTGVFMGAFPGGYGIGADLEGYGATAGLNVLSGRLSYFFGLEGPAVTVDTACSSSLVALHQAGYALRQGECSLALIGGVTVMATPHTFVEFSRQRGLASDGRCKAFADSADGTGWSEGVGVLLVERLSDAQAKGHQVLAVVRSSAVNQDGASNGLSAPNGPSQQRVIRQALANAGLTTAEVDVVEAHGTGTTLGDPIEAQAVIATYGQDRDQPVLLGSVKSNVGHTQAAAGVSGVIKMVMALQHGLVPRTLHVDEPSRHVDWTDGAVELVTENQSWPEAGRPRRAGVSSFGVSGTNAHVILESAPPTQAVDDVRPADAPVVASVMASELVPLVISAKTQSALAEYEGRLRAYLAASPGVDMRAVASTLAMTRSVFEHRAVIVGDDTVSGTAATDPRVVFVFPGQGSQRAGMGAELAAAFPVFARIHQQVWDLLDVPDLEVNETGYAQPALFALQVALFGLLESWGVRPDAVIGHSVGELAAAYVSGLWSLEDACTLVSARARLMQALPAGGVMVAVPVSEDEARAVLGEGVEIAAVNGPSSVVLSGDEAAVLQAAEGLGKWTRLATSHAFHSARMEPMLEEFRAVAQGLTYHAPGVVMAAGDRVMTAEYWVRQVRDTVRFGEQVASYEDAVFVELGADRSLARLVDGVAMLHGDHETQAAIGALAHLYVNGVTVDWTALLGDVPVTRVDLPTYAFQQQRYWAERWLAALAPAEREKALLKLVSDGAATVLGHADTSTIPATTAFKDLGIDSLTAVELRNSLAKATELRLPATLVFDYPTPTALAARLD

SEQ ID NO: 154 - protein, 924 aa, Streptomyces rapamycinicus
EPLAIVGMACRLPGGVSSPEDLWRLVESGTDAISGFPTDRGWDVENLYDPDPDAPGKSYSVQGGFLDAAAGFDASFFGISPREALAMDPQQRLMLEVSWEAFERAGIEPGSVRGSDTGVFIGAYPGGYGIGADLGGFGTTAGAASVLSGRVSYFFGLEGPAFTVDTACSSSLVALHQAGYALRQGECSLALVGGVTVMATPQTFVEFSRQRGLSADGRCKAFADAADGTGWAEGVGVLLVERLSDAQANGHQILAVVRSSAVNQDGASNGLSAPNGPSQQRVIRAALSNAGLAPHEVDVVEAHGTGTTLGDPIEAQAVIATYGQGRGEPLLLGSLKSNVGHTQAAAGVSGVIKMVMALQHSMVPRTLHVDEPSRHVDWSAGAVELVAENQPWPETGRPRRAGVSSFGISGTNAHVILESAPAQSVGDTAGSTPVLVSELVPLVISAKTQPALTEHEDRLRAYLAASPGVDIRAVASTLAVTRSVFEHRAVLLGDETVTGTAVSDPRIVFVFPGQGWQWLGMGSALRDSSVVFAERMAECAAALSEFVDWDLFAVLDDPAVVDRVDVVQPASWAVMVSLAAVWQAAGVRPDAVIGHSQGEIAAACVAGAVSMRDAARIVTLRSQAIAGLAGRGAMASVALPAQDVELVDGAWIAAHNGPASTVIAGTPEAVDHVLTAHEAQGVRVRRITVDYASHTPHVELIRDELLDITSDSSSQTPLVPWLSTVDGTWVDSPLDGEYWYRNLREPVGFHPAVSQLQAQGDTVFVEVSASPVLLQAMDDDVVTVATLRRDDGDATRMLTALAQAYVHGVTVDWRAVLGDVPATRVDLPTYAFQHQRYWAEAWLVGLAPEERAKALLKVVRDSAATVLGHADARSIPATGAFKDLGVDSLTAVELRNSLTKATGLRLPATMVFDYPTPADLAARL

SEQ ID NO: 155 - protein, 922 aa, Streptomyces rapamycinicus
EPLAIVGMACRLPGGVSSPEDLWRLLESGTDAVSGFPTDRGWDVENLYDMAGKSHRAEGGFLDAAAGFDAGFFGISPREALAMDPQQRLVLEVSWEAFERAGIEPGSVRGSDTGVFMGAYPGGYGAGADLGGFAATASATSVLSGRVSYFFGLEGPAFTVDTACSSSLVALHQAGYALRQGECSLALVGGVTVMATPELFTEFSRQRGLASDGRCKAFADSADGTGWAEGVGVLLVERLSDAQAKGHQVLAVVRSSAVNQDGASNGLTAPNGPSQQRVIQAALSNAGLAAHEVDVVEAHGTGTTLGDPIEAQAVIATYGQDRERPLLLGSLKSNIGHAQAASGVSGVIKMVMALQHNTVPRTLHVDEPSRHVDWAAGAVELVRENQPWPGTDRPRRAGVSSFGVSGTNAHVILESAPPAQPAEEAQPVETPVVASDVLPLVISAKTQPALTEHEDRLRAYLAASPGVDTRAVASTLAVTRSVFEHRAVLLGDDTVTGTAVSDPRVVFVFPGQGWQWLGMGSALRDSSVVFAERMAECAAALSEFVDWDLFTVLDDPAVVDRVDVVQPASWAVMVSLAAVWQAAGVRPDAVIGHSQGEIAAACVAGAVSLRDAARIVTLRSQAIAGLAGRGAMASVALPAQDVELVDGAWIAAHNGPASTVIAGTPEAVDHVLTAHEARGVRVRRITVDYASHTPHVELIRDELLDITSDSSSQAPLVPWLSTVDGSWVDSPLDGEYWYRNLREPVGFHPAVGQLQAEGDTVFVEVSASPVLLQAMDDDVVTVATLRRDDGDATRMLTALAQAYVHGVTVDWPAILGTATTRVDLPTYAFQHQRYWLRSWLAALAPAEREKALLKLVCDSAAMVLGHADARSIPAAGAFKDLGVDSLMAVELRNGLVKATGLRLPATLVFDYPTPTVLAARLD

SEQ ID NO: 156 - protein, 926 aa, Streptomyces rapamycinicus
EPLAIVGMACRLPGGVSSPEDLWRLVESGTDAVSGFPTDRGWDVENLYDSDPEAAGKSYCVQGGFLDTAAGFDAGFFGISPREALAMDPQQRLLLEVSWEAFERAGIEPGSVRGSDTGVFIGAFPVGYGAGFDREGYGATSGPSVLSGRVSYVFGLEGPAITMDTACSSSLVALHLAAQALRNGECSMALAGGVTVMATPEVFTEFARQRGLASDGRCKAFADSADGAGFSEGAGLLLVERLSDARRNGHQVLAVVRGSAVNQDGASNGLTAPNGPSQQRVIRAALSNAGLSTADVDVVEAHGTGTTLGDPIEAQALLATYGQDREQPLLLGSLKSNIGHTQAASGVSGVIKMVMALRHGFVPRTLHVDEPSRHVDWAAGAVELVRENQPWPGTDRPRRAGVSSFGVSGTNAHVVLESAPPAQPAEEEQPVETPVVASDVLPLVISAKTQPALTEHEDRLRAYLAASPGADTRAVASTLAVTRSVFEHRAVLLGDDAVTGTAVTDPRVVFVFPGQGWQWLGMGSALRDSSVVFAERMAECAAALSEFVDWDLFAVLDDPAVVDRVDVVQPASWAVMVSLAAVWQAAGVRPDAVIGHSQGEIAAACVAGAVSLRDAARIVTLRSQAIAGLAGRGAMASVALPAHEIELVDGAWIAAHNGPASTVIAGTPEAVDHVLTAHEARGVRVRRITVDYASHTPHVELIRDELLGITAGIGSQPPVVPWLSTVDGSWVDSPLDGEYWYRNLREPVGFHPAVSQLQAQGDAVFVEVSASPVLLQAMDDDVVTVATLRRDDGDATRMLTALAQAYVHGVTVDWPAILGTTTARVLDLPTYAFQHQRYWVKSWLAALAPEERAKALLRVVCDSAATVLGHADIDSIPVTAAFKDLGVDSLTAVELRNSLAKATGLRLPATLVFDYPTPTALAARLD

SEQ ID NO: 157 - protein, 902 aa, Streptomyces rapamycinicus
EPLAIVGMACRLPGGVSSPEDLWRLVESGTDAISDFPADRGWDVENLYDPDPDASGKSYCVQGGFLDSAGGFDASFFGISPREALAMDPQQRLVLEVSWEAFERAGIEPGSLRGSDTGVFIGAYPGGYGAGAGADLEGYGTTSGPSVLSGRVSYFFGLEGPAITVDTACSSSLVALHQAGYALRQGECSLALVGGVTVMATPDVFTEFARQRGLATDGRSKAFADSADGAGFSEGIGVLLVERLSDAEAKGHQVLAVVRSSAVNQDGASNGLTAPNGPSQQRVIQTALSNAGLTTAEVDVVEGHGTGTTLGDPIEAQAVIATYGQDREQPLLLGSLKSNIGHTQAAAGVSGVIKMVMALRHALVPRTLHVDEPSRHVDWTAGAVELVTENQPWPEIGRPRRAGVSSFGVSGTNAHVILESAPPTQAEDAAQPVEAPVMGSEPVPLVISAKTLPALNAHEDRLRAYLAASPGVDMRAVASTLAMTRSMFEHRGVLLGDGTVSGTAVSDPRVVFVFPGQGSQRAGMGEELAAAFPVFARIHQQVWDLLDVPDLDVNETGYAQPALFALQVALFGLLESWGVRPDAVIGHSVGELAAAYVSGVWSLEDACTLVSARARLMQALPAGGVMVAVPVSEDEARAVLGEGVEIAAVNGPSSVVLSGDEAAVLQAAEGLGKWTRLATSHAFHSARMEPMLEEFRAVAEGLTYRTPQVAMAAGDQVMTAEYWVRQVRDTVRFGEQVASFEDAVFVELGADRSLARLVDGVAMLHGDHEAQAAVGALAHLYVNGVSVEWSAVLGDVPVTRVDLPTYAFQHQRYWLEGRWLAALAPAEREKALLKLVSDGAATVLGHADTSTIPATTAFKDLGINSLTAVELRNSLAKATELRLPATLVFDYPTPAALAARLD

SEQ ID NO: 158 - protein, 892 aa, Streptomyces rapamycinicus
EPLAIVGMACRLPGGVSSPEDLWRLLESGTDAVSGFPTDRGWDVENLYDMAGKSHRAEGGFLDAAAGFDAGFFGISPREALAMDPQQRLVLEVSWEAFERAGIEPGSVRGSDTGVFMGAYPGGYGIGADLGGFGATASSVSVLSGRVSYFFGLEGPAFTVDTACSSSLVALHQAGYALRQGECSLALVGGVTVMATPQTFVEFSRQGGLASDGRCKAFADAADGTGWAEGVGVLLVERLSDARRNGHQVLAVVRGSAVNQDGASNGLTAPNGPSQQRVIRAALSNAGLSTAEVDVVEAHGTGTTLGDPIEAQALIATYGQDRDQPVLLGSVKSNLGHTQAAAGVSGVIKMVMALQHGLVPRTLHVDEPSRHVDWSAGAVQLVTENQPWPDMGRARRAGVSSFGISGTNAHVILESAPPTQPADNAVIERAPEWVPLVISARTQSALTEHEGRLRAYLAASPGVDMRAVASTLAMTRSVFEHRAVLLGDDTVTGTAVSDPRAVFVFPGQGSQRAGMGEELAAAFPVFARIHQQVWDLLDVPDLEVNETGYAQPALFAMQVALFGLLESWGVRPDAVIGHSVGELAAAYVSGVWSLEDACTLVSARARLMQALPAGGVMVAVPVSEDEARAVLGEGVEIAAVNGPSSVVLSGDEAAVLQAAEGLGKWTRLATSHAFHSARMEPMLEEFRAVAEGLTYRTPQVSMAVGDQVTTAEYWVRQVRDTVRFGEQVASYEDAVFVELGADRSLARLVDGVAMLHGDHEIQAAIGALAHLYVNGVTVDWPALLGDAPATRVDLPTYAFQHQRYWLEGRWLAALAPAEREDALLKLVRDSAALVLGHADASTIPAAAAFKDLGIDSLTAVELRNSLAKATGLRLPNTTVFDYPTPAILATRL

SEQ ID NO: 159 - protein, 924 aa, Streptomyces rapamycinicus
EPLAVVGMACRLPGGVSSPEDLWRLVESGTDAISGFPADRGWDAESLFDPDPAVGKSYCVEGGFLDSAASFDAGFFGISPREALAMDPQQRLIMEVSWEAFERAGIEPGSVRGSDTGVFMGAYAGGYGAGADLGGFAATASATSVLSGRVSYFFGLEGPAITVDTACSSSLVALHQAGYALRQGECSLALVGGVTVMATPQSFVEFSRQRGLASDGRCKAFADSADGTGWAEGVGVLLVERLSDAQAKGHQVLAVVRSSAVNQDGASNGLTAPNGPSQQRVIQAALSNAGLAAHEVDVVEAHGTGTTLGDPIEAQALIATYGQDRERPLLLGSLKSNIGHAQAASGVSGVIKMVMALQHNTVPRTLHVDEPSRHVDWAAGAVELVRENQPWPGTDRPRRAGVSSFGVSGTNAHVILESAPPAQPAEEAQPVETPVVASDVLPLVISAKTQPALTEHEDRLRAYLAASPGADIRAVASTLAVTRSVFEHRAVLLGDDTVTGTAVTDPRIVFVFPGQGWQWLGMGSALRDSSVVFAERMAECAAALREFVDWDLFTVLDDPAVVDRVDVVQPASWAMMVSLAAVWQAAGVRPDAVIGHSQGEIAAACVAGAVSLRDAARIVTLRSQAIAGLAGRGAMASVALPAQDVELVDGAWIAAHNGPASTVIAGTPEAVDHVLTAHEAQGVRVRRITVDYASHTPHVELIRDELLDITSDSSSQTPLVPWLSTVDGTWVDSPLDGEYWYRNLREPVGFHPAVSQLQAQGDTVFVEVSASPVLLQAMDDDVVTVATLRRDDGDATRMLTALAQAYVHGVTVDWPAILGTTTTRVDLPTYAFQHQRYWLKSRLTGRTSVEQHRIMLELVLGEAASVLGHSSADAIATDTSFKDLGMDSLTAIELRNRLVAETGLQLPATMVFDYPTANALAAHL

SEQ ID NO: 160 - protein, 966 aa, Streptomyces rapamycinicus
EPIAIVAMACRLPGGVSSPEGLWHLVESGTDAISGFPTDRGWDVEGLFDPDPDAAGKSYCVQGGFLDTAADFDAPFFGISPREALGMDPQQRLLLETTWEAIERAQIDPKSLRGRDVGVYVGGAAQGYGVGVDQQHDNGITGSSVSLLSGRVSYALGLEGPGVTVDTACSSSLVALHLASQALRQRECSLALVSGVSVMSSPAMFVEFSRQRGLSSDGRCKSFAASADGTIWSEGVGVLVVERLSDARRLGHRVLATVRGSAVNSDGASNGLTAPNGTSQQRVIRQALANAGLTASDVDVVEAHGTGTKLGDPIEAEAILATYGQERSAPAWLGSLKSNIGHAMAASGVLSVIKMVEAMGHGSLPRTLHVDAPSPHVDWTSGSVALLTEHQPWPDDTKLRRAGVSSFGLSGTNAHVVLEQYQAPAPPVTPVTPAPPTPVTPVTPNEPGPLPWVLSAQSPKALREQAGRLYASLAGDSEWNSLDIGYSLATTRSDFAHRAVAVGSGREFLRALSKLADGAPWPGLTTATATAKARRVAFLFDGQGTQRLGMGKELYDSYPAFARAWDTVSAGFDKHLDHSLTDVCFGEGGSTTAGLVDDTLYAQAGIFAMEAALFGLLEDWGVRPDFVAGHSIGEATAAYASGMLSLENVTTLIVARGRALRTTPPGAMVALRAGEEEVREFLSRTGAALDLAAVNSPEAVVVSGEPEPVADFEAAWTASGREARKLKVRHAFHSRHVEAVLDEFRTALESLKFRAPALPVVSTVTGRLIDQDEMGTPEYWLRQVRRPVRFQDAVRELAEQGVGTFVEVGPSGALASAGVECLGGDASFHAVLRPRSPEDVCLMTAIAELHAGGTAIDWAKVLSGGRAVDLPVYPFQHQSYWLAPAEPSYADEPRTMLELVHMEVASLLGMADPGVILDDSSFLELGFDSLSAVRLRNRLSKATGLDLPSTLLFEHPTSAELAAHLD

SEQ ID NO: 161 - protein, 1297 aa, Streptomyces violaceusniger
MSRAELVRPIYDLLRANAERLGDKMAYVDSRLALTHAELAARTGRIAGHLVDMGVDRGDRVAILLGNRVENIESYLAIARASAVAVPLNPDATEAEVAHFLSDSGAVVVITDSAHLDDVRRTAPAVTIVLVGEERIPPGVRSFAELATAEPQQSARDDLGLDEAAWMLYTSGTTGTPKGVLSTQGSGLWSAAYCDIPAWELTENDVLLWPAPLFHSLALHLCVLATTAVGATARIMNGFVASEVLEELTEHPCTVLVGVPTMFRYLLGAADTFEPRTSSLKMGLVAGSVAPASLIEGFEDVFGVPLLDTYGCTETSGSLTVNWLSGERVPGSCGLPVPGLSLRFVDPISGADVADGEEGELWASGPSIMIGYHEQPEATAEVLSDGWYRTGDLARRSETGHVTITGRIKELIIRSGENIHPHEIEAVALDVPGVKDAAAAGKRHPVLGEVPVLYVVPETGGVDADMVLAVCRERLSYFKVPEEIYRVDAIPRTASGKVKRSSLTEEPAELLAGASGGETLHRLEWIPLELPEQAAPDGHVVVRVDSLASDDSDLADADLADAVRDLARSWLADKRRADSTLVFVTRRAVHTGPSDIPSPEHAAVWDAIRREQTENPGVFVVIDVDDDDDDDDDVNDREDDDTLLPALAGLGEPQVALRDGNPLVPRLAHANTPDSGSLTIPEDRAWLLEHSRSGTLRDLALVPADAAERPLHPGEVRISVRAAGLNFRDVLIALGTYPGEGLMGGEAAGVVLEVGSEVSDLAPGDRVFGLVGSAFGTVAIADRRLLGAIPDTWSFATAASIPIVFATAYYGLVDLAGLSAGESVLIHAAAGGVGMAATQIARHLGARIFATASVGKQHILSEAGLEDTRIAGSRTLAFREAFLNTTDGQGVDVVLNSLSGDFVDASLDLLPRGGRFLEMGKTDIRDADRITADRPGTTYQAFDLLDAGPDRLREIIAELLPLFAQGVLRPLPLLTWDIRKARDAFSWMSRARHTGKITFTIPRQLDPGGTVLIADGSGVLTGTVARHLVAEQGVRHLLLLSRSTPDEALINELIESGARVDTAVRDVSDRAGLEQALAGISPEHPLTAVIHTGGPAVAHESHQLHGLTKRLDLAAFVVFSQDAPASVDALARRRRAEGLPTTTIAWGIPEAEAVVVQGPLLGRAMASADSAHIVTRLNTVGLRALAAADTLPPLLRNLVGAQTDNTQQQAWSRQLLAAEAAREQALRDLVRSCVMDILGLSAADRYAPDKTFREMGIDSLTAVELRNSLAKATDLRLPATMVFDYPTPAMLVVRLGE

SEQ ID NO: 162 - protein, 1217 aa, Streptomyces violaceusniger
MSREEFIQPIHDLLRVNAERLGDKIAYADSRRELTHAELRTRTGRIAGHLVDLAVERGDRVAILLGNRVETIESYLAIARAGAIAVPLNPDATGAEVAHFLADSGAVLVITDSAHLDDVRRAAAAVTVVLVDEGPLPAGTRSFAELATAEPPTPARDDLGLDEAAWMLYTSGTTGTPKGVVSTQGSGLWSAANCDVPAWELTENDVLLWPAPLFHSLAHHLCLLATTAVGATARIMSGFVAGEVLHELEEHACTVLVGVPTMYHYLLGAVGEAGPRLPSLKMGLVAGAVSPPALIEGFERVFGVPLLDTYGCTETTGSLTVNRLSGPRMPGSCGQAVPGISLRFVDPHTGAEVAEGEEGELWASGPSLMIGYHGRPDATREVLSDGWYRTGDLARRSETGHVTITGRVKELIIRGGENIHPRDIEAVALELPGVRDAAAAGKQHPVLGEIPALYLVPDADGVDAEAVLAACREKLSYFKVPEEIYRVDAIPRTLSGKVKRAALTEAPAELLSAASGNGSLYRLEWVPAETPPAGTGGPVAVHVTRRAVATGPADLPDQEQAATWDALRGEQTGPGGPVLIDLDGADIDDARLSALASLGEPQIVVRDDTPLVARLAREKSPALTIPGERAWVLEPDHSGVLQELALVAADTDVRPLRPGEVRIEVRAAGLNFRDVLVALGTDLGDGVFGAEGAGVVLETGSDVRDLRPGDRVFGLLEGGHGSIAIADRRMLAVIPEGWSFATAASVPEVFVIAYYGLVDLAGLRAGESVLIHAATGGVGMAATQIARHLGAQVYATAGVGKQHILRDAGLGDDRIADSRTTDFREAFRDSTQGRGVDVVLNSLKGDFVDASLDLLADGGRFLELGQTDIRDAGEIAAERPGTTYHSFTRMNAGPDRLREIIAELLALFEQGVLRPSPVHTWDIRHAREAFSWMSGGRHTGKMVLTMPQRIDPGGTVLIAGDSEALARIAARHLGVRHLLLDRGVADAAPDAVVCDVSDHDALERVLADLSPEHPLTAVIHTGGAAVTDEIRRLHDLTESLDLTDFVVFSQDAPAAVEAFARSRRAHGLPVRTIAWGIPEADPVVADEHLLGRALASAEQAQIVARVNTAGLRALTAANALPTLLRNLIRAEPEETGQSAWPHRFEAAGADREEALLDLIRANVVDILSLPTADRYAPDRTFREMGIDSLTAVGLRNSLAKATGLPLPTTMVFDYPTP

SEQ ID NO: 163 - protein, 1299 aa, Streptomyces filamentosus
MSHAKLIQPIYDLLRVNAERLGDKIAYADSRHALTYTELEARTGRLAGHLADLGVERGDRVAILLDNRVETIESYLAIARASAIAVPLNPAAAGDELAHFLSDSGSVLVITDSAHLDDVRLVAPAVTVVRVDEDPVPPGVRSFAELVAVEPRTQARDDLGLDEAAWMLYTSGTTGTPKGVVSTQGSGLWSAAFCDVPAWELTEEDVLLWPAPLFHSLAHHLCLLATITAGATARIMNGFVASEVLNELEKHACTVLVCVPTMYHYLLGAVGEGESRTFSLKLGVVAGSVSPPALIEGFEKAFGAPLLDTYGCTETTGSLTVNWLNGPRVPGSCGTAVPGVTLRFVDPSTGADVADGEEGELWASAPSVMTGYHGQPEATREVLTDGWYHTGDLARRSETGHVTITGRIKELIIRGGENIHPQEIEAAVLGLPGVRDAAAAGRPHPVLGDVPALYIVPDADGVDADAVLAACRERLSYFKVPEEIYRVDAIPRTMSGKVKRTSLTEAPAELLAGASGSDALYRLKWVPAETPGPAATGGHVIVRVASLRADGTELAGAARDLARSWLSDERRAGATLVFVTGRAVSAGPSDVPVPEHAAVWDAIRDEQTENPGAFVLIDLEEAETEEPESAAPEAGDPQADTPGADDTRLSTLVALGEPQIALRDSTPLVPRLAPESSTALTTPAARAWVLEPARSGTLRELSLVAADTDARPLRPGEVRVDVRAAGLNFRDVLIALGTYPGDGVMGGEAAGVVLEVGPEVNDLSVGDRVFGLVTDGFGPVTITDRRLLAAMPQDWSFTTAASAAMAFATAHYGLVELAGLKAGESVLIHAATGGVGMAATQIAHHLGAHIYATASSGKQHLLRAAGIDDDRIANSRTTGFRDAFLDSTGGRGVDVVLNSLSGEFVDSSLDLLAHGGRFIEMSTDIRDAGRIAAERPGTTYQAFHLVDADPDRLREILTELLALFDQGILDPLPVQAWDIRQAREAFSWMSRARHTGKLVLTIPQHIDPDGTVLITGGSGGLAGVVARHLVADKGARRLLLLSCDTLDATLAAELTESGARVDTAVCDVSDRAALAQVLAGVSPEHPLTAIVHAGGAAVADESRQLHHLTKNRDLAAFVVFSQDAPAATEAFAGIRQAEGLPVTTIAWGIPEAEPVVVGQHLLDRAMASADRAHVAARVNTAGLRALAAANALPPVLKNLVGAETDGTGHQDWSRRFMVAEAARQQELLDLIRTTVMEILSLPTTARYFPDRTFRENGIDSLTAVELVNSLAKTTGLRLSATMVFDYPTPTALAGRMREL

SEQ ID NO: 164 - protein, 1239 aa, Streptomyces hygroscopicus
MSRLDLIRPLSESLCASAASFGDKVAYTDSRRSVTYAELQIRTGRLAGHLAEHGVARGDRVAILLGNRVEIIESYLAVARASAVAVPLNPDAMDAELAHFLRDSGAVVVITDLAHLEQTRGVAPAMTVVLIGDGRTVPGTSSFAELADTEPASPARDDLRLDEPAWMLYTSGTTGTPKGVVSAQRSGLWSAASCDVPAWDLSDEDLLLWPAPLFHSLGHHLCLLAVVAVGASARIMSGFAADEVLDALREHPCTVLVGVPTMYRYLLAAVGESGADAPALKMALIAGSVTPASLVEAFERSFGVPLIDTYGCTETTGSVTANRLHGERVPGSCGVPVPGVEIRLVDPVTGADVPLGAEGELWAKTPSVMIGYHGQPEATGEVLVDGWYRSGDLARRQESGHITITGRVKELIIRSGENIHPREIETVALEVPGVEDAAAAGKPHRVLGEVPVLYVVPAEAGVDVTAVFAACREQLSYFKVPEEIYQVESIPRTPSGKVKRGLLTEQPAELLAAADGGGSLYRVEWRPAVPPGAGDTGGDSPVVVRVDSLPADEQELLGAVRDLIHDRIADPRRTTAPLVFVTRHAVLSRNPAHAHAAVWDLVSRAQADNPGLFVLVDADGDDAPLPSAVGLGEPRVAWRDGGLLVPRLAHPGTEALIAPESGSWLLAETGGGTLRDLALVGTDTADRVLLPGEVRIAVRAAGLNFRDVTVALGVVSDDRLMGGEAAGVVLDVAPDVTDLEPGDRVFGLVEGAFASVAVTDRRLLGRIPAGWSFATAASVPVVFSTAYHALTDLVDLRPGEAILIHAAAGGVGMAATQLARHIGAKIYATASPAKQHALLGVDQVANSRTTEFRGTFLEATGGRGVDVVLNSLAGEHIDASLELLPRGGRFLELGKTDLRDPRHLPAGVSYQVLNRLDSSPDRVREILAELLVMFERGVLRPLPVRTWDIREAPEAFSWMSRGRHLGKIVLTIPRDLDPDGTVLVTGASADHMARYLSAERGHAHVLVSDDPAAVPATHPLTAVVHTGGDEVVSESTRLHQLTRELDLAAFAVFSQSAPASVEALVRHRRTEGLPATAVSWGLPEAEPAPVQGALLDRTIASVEPAHVVTRVNSAGLRALANSGELPSVLRDVTPALSAKWPRPGTPRPGTPRPGTPHPAALDQAALLDLVRESLTTVLGLPGVESCAPDRPFRETGLDSLTTIGLANTLSARLGRKLPATMIFDHPTPRTLATRLAEEL

SEQ ID NO: 165 - protein, 878 aa, Micromonospora sp.
MTPAYDVRPLPELLIANAERLGDKPAYTGLHRTVGHAELADRTRRAAGHLAGFAARGDRIALLLGNRVEMVEGYLAVARAAAVAVPLNPQASDAELAHFLTDSEAVAVLADAEHTEQVRRVAPGLRLVPIGEWETLATTEPDRPARDDLGLDEVAWMLYTSGTTGAPKGVLSTQGSGLWSAYHCDVPALGLTDADVLLWPAPLFHSLAHHLAVLAATVSGATVRLLSGFAADEVLRELREEGCTLLAGVPTMYHYLLGAAGPDDEVRAPALRGAVVAGAVTPAALITAFGERFGAPLLDTYGCTETTGSLTINRLDGPRVPGSCGVAVPGVRLRLVDPRTGDDAPEGGEGEIWASGPSLMRGYHRRPDATAEVLADGWYRTGDLAVRAATGHITITGRVKELIIRGGENIHPREIEAVLAEVPGVADVAVAGRSHAVLGDLPVAYLVTEAGLDPAALFAACRERLSSFKVPEEVYRVAAVPRTPSGKIKRRELVAGPAELLATAGGAETLLRTRWTAVDVLDPASLDGWRVVHADQEVDLGGRLDDDGPAIVVTTRAVRTSADERPSASAAAAWDLVTAAQARRPGRYLLVDTDGVPGGLGAALATGEPQVAVREDVVLVPRLEAAGETGAPVRLDGTVLVTGEHTERVARHLRARGVTVTDDPAARPLHAVVHVGGTSGLAELAELTGCPERAAFVVCTEDSRATADALVRAIPGGVAVGVGLPGIEPAALLPELLDRLTADGPYVVARPGSTGLRALATAGRLPAGLGALVDTGAAPDPDAAVRRDLVRRLIALPRRARDQALVELVWDAVRATLGAGATPGGPGQAFSEVGFDSLTSVQLRNRLVAATGVRLSATAVFDFPTPRALADELGRVLI

SEQ ID NO: 166 - protein, 7934 aa, Streptomyces violaceusniger
MSREEFIQPIHDLLRVNAERLGDKIAYADSRRELTHAELRTRTGRIAGHLVDLAVERGDRVAILLGNRVETIESYLAIARAGAIAVPLNPDATGAEVAHFLADSGAVLVITDSAHLDDVRRAAAAVTVVLVDEGPLPAGTRSFAELATAEPPTPARDDLGLDEAAWMLYTSGTTGTPKGVVSTQGSGLWSAANCDVPAWELTENDVLLWPAPLFHSLAHHLCLLATTAVGATARIMSGFVAGEVLHELEEHACTVLVGVPTMYHYLLGAVGEAGPRLPSLKMGLVAGAVSPPALIEGFERVFGVPLLDTYGCTETTGSLTVNRLSGPRMPGSCGQAVPGISLRFVDPHTGAEVAEGEEGELWASGPSLMIGYHGRPDATREVLSDGWYRTGDLARRSETGHVTITGRVKELIIRGGENIHPRDIEAVALELPGVRDAAAAGKQHPVLGEIPALYLVPDADGVDAEAVLAACREKLSYFKVPEEIYRVDAIPRTLSGKVKRAALTEAPAELLSAASGNGSLYRLEWVPAETPPAGTGGPVAVHVTRRAVATGPADLPDQEQAATWDALRGEQTGPGGPVLIDLDGADIDDARLSALASLGEPQIVVRDDTPLVARLAREKSPALTIPGERAWVLEPDHSGVLQELALVAADTDVRPLRPGEVRIEVRAAGLNFRDVLVALGTDLGDGVFGAEGAGVVLETGSDVRDLRPGDRVFGLLEGGHGSIAIADRRMLAVIPEGWSFATAASVPEVFVIAYYGLVDLAGLRAGESVLIHAATGGVGMAATQIARHLGAQVYATAGVGKQHILRDAGLGDDRIADSRTTDFREAFRDSTQGRGVDVVLNSLKGDFVDASLDLLADGGRFLELGQTDIRDAGEIAAERPGTTYHSFTRMNAGPDRLREIIAELLALFEQGVLRPSPVHTWDIRHAREAFSWMSGGRHTGKMVLTMPQRIDPGGTVLIAGDSEALARIAARHLGVRHLLLDRGVADAAPDAVVCDVSDHDALERVLADLSPEHPLTAVIHTGGAAVTDEIRRLHDLTESLDLTDFVVFSQDAPAAVEAFARSRRAHGLPVRTIAWGIPEADPVVADEHLLGRALASAEQAQIVARVNTAGLRALTAANALPTLLRNLIRAEPEETGQSAWPHRFEAAGADREEALLDLIRANVVDILSLPTADRYAPDRTFREMGIDSLTAVGLRNSLAKATGLPLPTTMVFDYPTPAVLTARMRELLAGESPAPARTAARAVAQDEPLAIVGMACRLPGGVSSPDDLWRLVAAGTDAISEFPADRGWDVDNLYDPDPDAPGKTYTVLGGFLDGVAGFDASFFGISPREALAMDPQQRLMLEVSWEAFEHAGIPPRSVRGSDAGVFMGAFPSGYDAGLEEFGMTGDAVSVLSGRVSYFFGLEGPAITVDTACSSSLVALHQASSALRQGECSLALVGGVTVLATPQTFVEFSRQRGLALDGRSKAFADAADGAGWAEGVGVLVVERLSDARAKGHQIWGVIRGSAVNQDGASNGLSAPNGPSQQRVIRQALANAGLAPHEVDVVEAHGTGTTLGDPIEAQAVIATYGQDREQPLLLGSLKSNVGHTQAAAGVSGVIKMVMALQHDTVPATLHVDAPSRHVDWTAGAVELVTENRPWPETGRVRRAGVSSFGISGTNAHVILESAPEQPVSPPEAVAPVVASDRVPLVISAKTPAALAEMENRLRAYLAAAPGADPRAVASTLATARSVFEHRAVLLGENTITGTVAGADPRVVFVFPGQGWQQLGMGRALRESSPVFAARMAECAAALSEFVDWDLFTMLDDPAVIDRIDVLQPACWAVMMSLAAVWQAAGVRPDAVIGHSQGEIAAACVAGALSLRDAARIVALRSQLLAREMVGHGVMAAVALPADDIPLVDGVWIGACNGPSSTVISGTPEAVEVVVAACEERGARVRRITAAVASHSPLGEKIRTELLGISASIPSRTPVVPWLSTADGIWIEAPLDPAYWWRNLREPVGFGPAVDLLQARGENVFLEMSASPVLLPAMNDAVTVATLRRDDGTPDRMLTALAEAHAHGVIVDWPRVFGSTTRVLDLPTYAFEHQRYWAVSADRPSDAGHPMVETVVPLPASGGVALTGRVSLATHAWLADHAVRGTALLPGTAFVELVTRAATEVDCPVIDELVIEAPLPLTQTGAVQLSTTVGEADESGRRPVTVFSQADGTDAWTRHVTATIGRAASLPDPVAWPPAQAEPVDVTGFYDELAAAGYEYGPAFQGLRAAWSDGDTVYAEVVLAEEQAHEVDRYAVHPALLDAALQAGMVNTAGTGQGVRLPFSWNGIQVHSTGATTLRVAATPLADGWSVRAAADNGRPVATIGSLVTRPVTTDMLGSTTDDLFAVVWTEITAPEPGDPSDVGVFTALPEAGGDPLTQTRALTAQVLQTVQQWLAGEDRPLVVRTGTDLASAAVSGLVRSAQSEHPGRLILVESDDELTPEQLAGTAGLDEPRIRIDGGHYEVPRLAREDASLTVPEDRAWLLELPGSGTLRDLRVIPTDTAERPLRWGEVRVGVRAGGLNFRDVVVALGMVTDPRPAGGEAAGVVLETGPGVEDLSPGDRVFGILDGGFGSVAIADRRLLAVIPDGWSFTTAASIPVVFATAYYGLVDLAGLRAGESVLIHAATGGVGMAATQIARHLGAEIYGTAGIAKQHVLRDAGLGDDRIADSRTTGFRETFRDSTQGRGVDVVLNSLSGDFVDASLDVLAEGGRFIEMGKTDIRDAEQITHATYRAFDLMDAGPDRVREIIAELLGLFEQGVLRPLPVQAWDIRQARDAFTWMSRARHIGKIVLTIPQQLDPDGTVLISGGSGVLAGILARHLVAERGVRHLLLVSRSAPSEALISELTALGAQVETVACDVSDRVALEQVLDGVPLTAVFHTAAALDDGVVESLTPQRVDTVLRPKADAAWYLHELTRDADLAAFVMYSSVAGIMGAAGQGNYAAANAFLDALAAHRRREGLPALSLAWGLWEDASGLSAGLTETDHDRIRRGGLEAIAAEHGMRLFDTATRQGEPVLLASPLNLTRQGEVPALLRTLHRPVARRAATANGRPADLTPEALLKLVCGRAAAVLGHVDADAVPVAVAFRDLGVDSLTAVELRNSLAKATGLRLPATLVFDYPTPTVLAGRLGELLAGGTAPVRAAVVRRAAASDEPLAIVGMACRLPGGVLSPEDLWRLVESGGDAISGFPVDRGWDVENLFDPDPDAAGRTYAVRGGFLDGAAGFDASFFGISPREAQAMDPQQRLVLEVSWEAFERAGIEPGSVRGSDTGVFMGAYPGGYGVGTDLGGFGMTSVAVSVLAGRVSYFFGLEGPAMTVDTACSSSLVALHQAGSALRQGECSLALVGGVTVMPTPQTFVEFSRQRGLAADGRCKAFADAADGTGFSEGVGVLLVERLSDAQARGHNILAVVRGSAVNQDGASNGLTAPNGPSQQRVIRQALANAGLAGAEVDVVEAHGTGTTLGDPIEAQAVIATYGQDRDQPVLLGSLKSNLGHTQAAAGVSGVIKMVMALRHDTVPATLHIDEPSRHIDWTAGAVELVTENQSWPETGRARRAAVSSFGISGTNAHVILESAPAQPVPLVDTPVSAVTAGVVPLPISARTVPALADLEDRLRAYLTTTPETDLPAVASTLAVTRSVFEHRAVLLGEETVTGIAVSDPRVVFVFSGQGSQRVGMGEELAAAFPLFARLHRQVWDLLDVPDLEVDDTGYVQPALFALQVALFGLLESWGVRPEAVIGHSVGEVAAGYVAGVWSLEDACTLVSARARLMQALPAGGAMVAVPVSEERARAVLVDGVEIAAVNGPASVVLSGDESAVLRVAEGLGRWTRLSASHAFHSVRMEPMLEEFRQVASELTYREPRIVMAAGEQVTTPEYWVRQVRDTVRFGDQVAAFGDAVFLEIGPDRTLSRLIDGIPTLHGDDEQHAVVAALAELHVQGVPIDWSSILGANPARVLDLPTYAFQHERYWMVSTGRVGGEGHPLLGWGVPVAEAGGRLYTGRVARQDGPVLSVAAFVEMAFAAAGGRPIRELSVDALLYIPDDGTAELQTWVSEHRLTIHARYRDTEPWTRLATAALDTTAPATTHTPHPGLITTALTLTGDEAPAIWHDLTLHTSNATELHTHITPGDDGTLTITATDTTGQPVLTAHTATPTTIPVHTPTTPADDLLTLTWTQIPTPGPGDPTDIAVCTALPDPDGDPLAQTRTLTAQVLQSIQTTLTGEDRPLVVHTGTGLASAAVSGLVRSAQSEHPDRFILVESDDSLPQAQLAAVAGLDEPWLRITGSCYEVPRLTKTTTATATAVSEPVWNPDGTVLITGGSGALAGILARHLVTERGVRHLLLISRSTPSTTLTDELRELGAHVDVAACDVSDRDALARVLDGVDLTAVFHTAGALDDGVVESLTPQRLDTVLTPKADGAWHLHELTRDRDLTAFVMYSSAAGVMGAAGQGNYAAANAFLDALAEHRHADGLPALSLAWGMWDDTDGMTASLSGTDHRRIRRSGQRAITAEHGMRLLDKASGRSEPVLVATAMNPIPDTDLPALLRSLYPKTARKSQPIQELSPEALLKIVRDSAALMLGHPNTDAIAATTAFRDLGVDSLIAVELRNSLAKATGLRLPATLVFDYPTPTVLAGRLGELLAGVTPQRHATVRTGTASDEPLAIVGMACRLPGGVSSPEDLWRLVESGTDAITDFPTDRGWDTDDLFDPDPDTAGKTYTVHGGFLDDVAGFDASFFGISPREAQAMDPQQRLVLEAAWEAFERAGIEPGSVRGSDTGVFMGAYPGGYGIGADLGGFGATAGAGSVLSGRLSYFFGLEGPAMTVDTACSSSLVALHQAGSALRQGECSLALVGGVTVIANPQIFVEFSRQRGLAADGRCKAFADSADGTGWSEGVGVLLVERLSDAQARGHNILAVVRGSAVNQDGASNGLTAPNGPSQQRVIRQALANAGLAGAEVDVVEAHGTGTTLGDPIEAQAVIATYGQDRDQSVLLGSLKSNLGHTQAAAGVSGVIKMVMALQNGVVPRTLHADQPSRHIDWTAGAVELVTENQPWPELDRPRRAAVSAFGVSGTNAHVILESAPDQPVPLVDTPVSAVTAGVVPLPISARTVPALADLEDQLRAYLTTAPETDLPAVASTLATTRSVFEHRAVLLGEDTVTGTAIPDPRIVFVFSGQGSQRAGMGEELAAAFPLFARLHRQVWDLLDVPDLDVDDTGYVQPALFALQVALFGLLESWGVRPRAVIGHSVGEVAAGYVAGVWSLEDACALVSARARLMQALPAGGAMVAVPVSEERARAVLVDGVEIAAVNGPASVVLSGDEAAVLRVAEGLGRWTRLSASHAFHSVRMEPMLEEFRQVVSRLTYREPRIVMAAGEQVTTPEYWVRQVRETVRFGDQVAAFGDAVFLEIGPDRTLSRLIDGIAMLDGDDEVRAAVAALAMMHVQGVGVDWPAILGTTTGRVLDLPTYAFQHERYWMANADEGHPLLGKVEHPLLGSVMALPNSDGVVLTGRISLATHAWLADHVVRGTVLLPGTGFVEMVARAAAEVGCGVIDELLIEAPLLLPEHGGVHLSVSVGEADGAGRRPVTVFAQADDAEVWVRQVTATISPAGPAVSLPELEVWPPVQAEPVDVSTFYERLARADWQWGPAFQGLRAAWRDGDTIYAEIVLADEEAREADQFLVHPALLDAALQTSVLKTPDDLRLPFSWNQIEFHATGAAILRVAVTPVADRWIVHAADSTGRPVATIGALVSRPVTAETLGSNTDDLFALTWTEIPTPGPGDPADVAVCTALPEPDSDPLTQTRTLTAQVLQSIQTSLTGEDRPLVVHTGTGLASAAVSGLVRSAQSEHPDRFILVECDDETLTPDQLAATAGLDEPWLRITGGHYEVPRLTKTTTAAATTVSEPVWDPDGTVLITGGSGALAGILARHLVTERSVRHLLLISRSTPSTTLINELRELGAHIETAACDVSDRDALARVLDGVDLTAVFHTAGALDDGVVESLTPQRLDTVLMPKADAAWHLHELTRDRDLAAFVMYSSAAGVMGAAGQGNYAAANAFLDALAEHRRADGLPALSLAWGMWDDADGMTASLSGTDHRRIRRSGQRAITAEHGMRLLDKASGRSEPVLVATAMNPAGEGEVPALLRTLHRPVARRAATTNGRPADLTPEALLKVVRDSAAVVLGHASADTVPAATAFQELGLDSLIAVELRNSLAKATGLRLPATMVFDYPTPAALAGRLGELLAGETTPATAAVVRRATASDEPLAIVGMACRLPGGVSSPEDLWRLVESGFDAITGFPTDRGWDVDNLYDPDPDAPGKSTTLHGGFLDDVAGFDASFFGISPREAVAMDPQQRLAMEVSWEAFERAGIEPGSVRGSDTGVFMGAYPGGYGIGAELGGFMLTGRAGSVLAGRVSYFFGLEGPAMTVDTACSSSLVALHQAAYALRQGECSLALVGGVTVMPTPVMFVEFSQQQNLADDGRCKAFADSADGTGWSEGVGVLLVERLSDAQARGHNILAVVRGSAVNQDGASNGLTAPNGPSQQRVIRSALTSAGLTTADVDVVEAHGTGTTLGDPIEAQAVLATYGQDRDQPVLLGSLKSNLGHTQAAAGVSGVIKMVMALQNGVVPRTLHVEEPSRHVDWTAGAVELVTENQSWPETGRARRAAVSSFGFSGTNAHVILESAPAQPVPPMDTPAPAVTTGVVPLPISAKSLPALADLEDQLRAYLTATPETDLPAVASTLAMTRSVFEHRAVLLGEETVTGTAIPDPRIVFVFSGQGSQRVGMGEELAAAFPLFARLHRQVWDLLDVPDLDVDDTGYVQPALFALQVALFGLLESWGVRPRAVIGHSVGEVAAGYVAGVWSLEDACALVSARARLMQALPAGGAMVAVPVSEERARVALVDGVEIAAVNGPASVVLSGDEAAVLQIAEGLGRWTRLSASHAFHSVRMEPMLEEFGQVASELTYQEPRIVMAAGEQVTTPEYWVRQVRDTVRFGDQVAAFGDAVFLEIGPDRTLSRLIDGIAMLDGDDEVRAAVAALAELHVQGVPIDWPAVLGTTTGRVLDLPTYAFQHQRYWAASTDRPAGDGHPLLDTVVALPGADGVVLTGRISLATHAWLADHAVRGTVLLPGTGFVEMVARAAAEVGCAVVDELVIEAPLLLPASGGVQLSVSVGEADDAGHRPVTVHSQADETEAWVRHVTATISPSGPIVSPPEFEVWPPAQAEPVEVARFYDELAAAGYEYGAAFQGLRAAWRAGETIYAEVVLAEDQTLEAARFTVHPALLDAALQANILNASGDLRLPFSWGQVQFHTTGAATLRVAVTPVADGWTIQATDDAGRPVATVGSVVARPVAGLGATAEDLFALTWNEIPAPGQGGRTVGRFEDLADDGPVPELVVFTALPDVDADPLVRTRALTARVLEAIQRWLGEPRFADSTLVVRTGTDLASAAVSGLVRSAQSEHPDRFILVEGDSSPVEIGLDEPWLRVDGGRYEVPRLIRLSAEPVQEAAWNPDGMVLITGGTGALAGILARHLVAENKARRLLLVSRSVPDDALISELTELGAEVGTAVCDVSDRAALARVLAGVPSLTAVIHTAGVLDDGVMESLTPQRLDTVLRAKADGAWHLHELTRDRDLAAFVMYSSAAGLMGSPGQGNYAAANAFLDALAVERRAEGLPALSLAWGFWEETTGLTANLTGADRDRIRRGGLQTITAERGMRMFDTATQHGEPVLLAAPISPVRDGEVPALLRSLHRRGTRRGTTADASAQWLAGLAPEEREGALIKVVRDTAAVVLGHADAGTIPVTAAFKDLGLDSLTAVELRNSLAKSTGLRLPATMVFDYPTPASLAARLDDLMNPRVSSTALLAELDRIEGMFDSVTFDEKQASLVKDRLSAALGKWQQISRSADVATVALANADAGEILDFIDREFGNPTI

SEQ ID NO: 167 - protein, 8134 aa, Streptomyces violaceusniger
MPDHDKLVEYLRWATAELHTTRAKLQAATEAGTQPLAIVGMACRLPGGVSSPEDLWRLVESGTDAISGFPVDRGWDVDGLYDPDPDVPGKSYTVEGGFLDAVTGFDAPFFGISPREALAMDPQQRLVLEASWEAFERAGIEPGSVRGSDTGVFMGAFPGGYGTGADLGGFGMTGGAASVLSGRVSYFFGLEGPAMTVDTVCSSSLVALHQAGYALRHGECSLALVGGVTVMSTPQTFVEFSRQRGLAADGRCKAFADNADGTGWSEGVGVLLVERLSDAQARGHNILAVVRGSAVNQDGASNGLTAPNGPSQQRVIRQALANAGLTGADVDVVEAHGTGTTLGDPIEAQAVIATYGRDRDQPVLLGSLKSNLGHTQAAAGVSGVIKMVMALQNGVVPRTLHIEEPSRHVDWTAGAVQLVTENRPWPELGRARRAAVSSFGLSGTNAHVILESAPDQPPAPTTDTPVSAVTAGVVPLPISAKTVPALADLEDRLRTYLTTTPDTDLPAVASTLATTRSLFEHRAVLLGEDTVTGTAIPDPRVVFVFPGQGWQWQGMGSALLTSSTVFAERMAECAAALSEFVDWDLLTVLDDPSVVDRVDVVQPACWAVMISLAAVWQAAGIHPDIVLGHSQGEIAAACLAGAISLPDAARIVAQRSQLIAHQLTGHGAMASISLPADDIPTTDKVWIAAHNGTSTVIAGDPQAVEAVLATCETRGARVRKINVDYASHTPHVEQIRTELLDITTGIEAHTPAVPWLSTTDNTWIDQPLDPTYWYRNLREPVRFGPAIDLLQTQDNNLFIEISASPVLLQTMDNAATVATLRRDEDTTQRLLTAFAEAHVHGATIDWPTVLDTTTTPVLDLPTYPFQRQRYWATSNGRSTGQGHPLLETVVALPGTDGVALTGRISLATHPWLTDHTVRGTVLLPGTAFVELVTRAATEVNCQIIDELIIEAPLPLPQTDGVQLSVTVGEADEAGHRPVTVYSQTDESDDWIQHVTATIGPGASLPETAAWPPAHAEPVNVTGLYDNLAAAGYEYGPAFQGLQAAWRAGDTVYAEVTLAEEQAQETARFTMHPALLDAALHTIALHDTGDLHLPFSWTRVQFHGTGAATLRVAVTPAADGWNIRATDDTGRAVATIGSLVTRPMAAETTDDLLALTWTEIPAPEPVDPTDVVVFTALPDTVEDVPAQTRALTTRVLHTIQEWLADDDRTLIVRTGTDLASAAVSGLVRSAQSEHPGRFILVESADEALTQEQLAATAGLDEPRLRITGGRYEVPRLTREDTALAVPTDRAWLLEQPRSGSLEDLALLPTDAAERPLQAGEVRIGVRAAGMNFRDVVVALGMVTDTRLAGGEAAGVVLEVGTDVNDFRPGDRVFGILEGGFGSVAICDHRTLAVIPDGWSFTTAASVPIAFATAYYGLVDLAGLRAGESVLIHAATGGVGIAATQIARHLGAEIYGTASVGKQHVLRDAGLADDRIADSRTTDFRDTFRDGTQGRGVDVVLNSLRGEFIDASLDLLVDGGRFIEMGKTDIRDAAQIPDATYHAFDLMDAGHDRLREIMTELLALFEQGVLHPMPVHAFDIRQAREAFSWMSRARHIGKLVLTIPQPIDPDGTVLITGGSGVLAGIVARYLVTENRARHLLLLSRSAPSASLIDELTALGAHVDVAACDVADRAALAEILDGVDLTAVIHTAGALDDGVVESLTPQRLDTVLTPKADGAWHLHELTRDRDLAAFIVYSSAAGVLGAAGQGNYAAANAFLDALAVHRRLEGLPGLSLAWGLWEDASGLTADLTDADRDRIRRSGQRAITAAYGMRMLDAATRQSEAILLAAPISPIQDGDVPAILRSLHRRVGRRASVAHGHPADLTPEALLKVVRDSAAMVLGHTNADTVPTATAFQELGLDSLTAVELRNSLTKATGLRLPATMAFDYPTPDALAARLGELLAGEAAPKAAAAVRRATASDEPLAIVGMACRLPGGVSSPEDLWRLVESGTDAITDFPTDRGWDTDTLFDPDPDTPGKTYTVHGGFLNDVAGFDAPFFGISPREAVAMDPQQRLVLESSWEAFERAGIQPDSIRGSDTGVFMGAYPDGYGIGADLAGFGVTAGAGSVLSGRVSYFFGLEGPAMTVDTACSSSLVALHQAAYALRQGECSLALVGGVTVMPSPRTFIEFSRQRGLAADGRSKAFADAADGTGFSEGVGVLLVERLSDAQAKGHNILALVRSSAVNQDGASNGLTAPNGPSQQRVIQSALAGAGLTSADVDVVEAHGTGTTLGDPIEAQAVLATYGQDRDQPVLLGSLKSNLGHTQAAAGVSGVIKMVMALQHNTVPATLHVDAPSRHVDWTAGAVRLATENQPWPETNRPRRAGVSSFGVSGTNAHVILEQAPAASPVEPVDTTDVVIPLVVSARSSGSLSDQADRLAALVGSPDAPALTSLADALLTRRTVFSQRAVVVAGSHEQAAAGLRALASGDSHPALVTGAAGPARGVVLVFPGQGSQWAGMGAELLDTSPVFAARIAECAEALRPWVDWSLDEVLRGDASADVLGRVDVVQPASFAVMVGLAAVWESAGVRPDAVLGHSQGEIAAAYVAGALSLTDAAKIVAVRSRLIAARLAGRGGMASVALAPDEAAAKLGRTELAAVNGPASVVIAGDAEALDETLAMLEGEAVRVRRVAVDYASHTPHVEELEQSMAEALADVRSRQPRVGFLSTVTGDWVTEAGALDGGYWYRNLRQPVRFGPAVASLAEAGYTVFVEASAHPVLVQPVAETLDRTDAVVTGTLRRQDGGLPRLLTSMAELFVGGVPVNWPVLLPAGAVRGWVDLPTYAFDHQRYWLENRVATDAAALGLAGADHPLLGAIVAVPQSGGVAMTSRLSPRNHPWLAEHTLGGVPTVPTSVLVELAVRAGDEVGCGVVEELTVDAPLLLPERGGVRVQVIVGATDANGQRGLDIFSAPEDTGQEAWTRHATGTLAPGGDIAADVDLSAWPPANAQPVDVTDGYDLLERAGYGYGPAFQGVRAIWRRGEELFAEVALEPELTDTAARFGLHPALLDAAWHPELRDEVAETSPDGRRWWSQPSRWAGLRLHTAGATVLRVRLAPVDADSMSLQAADETGDPVLTVDSLSLCAVSADQLTTAESSDDALFRLEWTPLSKAPTAARSWVPVETGADVAALDGQAVVDAVMLEAAGTGDALELTCRVLEVVQAWLTLPGWDESRLVVVTRGAVGAVGDPAGSAVWGLVRAAQAENPDRIALLDLDGGRPVEPLLAESEPQLAIRGAEALVPRLIRAAAATDAPALFDESQTVLITGGTGSLGGLLARHLVGRYGLRRLVLVSRRGPDAPGAYELAAELAAHGAEAALVACDLTDRDAVARLLTEHHPTAVVHAAGVSDDGVIGTLTSDRLAYVFGPKATAARHLDELTRELLPDLAAFVTYSSISAVFLGAGSGGYAAANAYLDGLMARRHAEGLPGLSLAWGLWDQEADGGGMAAGLQDITRNRMRRRGGVLSFTPAEGMALFDAAMATDEALVVPVRLDLPALRAEAVAEGRSAPVLLRGLVRPGRRLARTVSGGTGVLADLTPEALLKLVRGRAAAVLGHVDADAVPVAAAFKDLGVDSLTAVELRNSLAKATGLRLPATLVFDYPTPTVLAGRLGELLAGGTAPVRAAVVRRAAASDEPLAIVGMACRLPGGVLSPEDLWRLVESGGDAISGFPVDRGWDVENLFDPDPDAAGRTYAVRGGFLDGAAGFDASFFGISPREAQAMDPQQRLVLEVSWEAFERAGIEPGSVRGSDTGVFMGAYPGGYGMGTDLGGFGMTSVAVSVLAGRVSYFFGLEGPAMTVDTACSSSLVALHQAGSALRQGECSLALVGGVTVMPTPQTFVEFSRQRGLAADGRCKAFADAADGTGFSEGVGVLLVERLSDAQARGHNILAVVRGSAVNQDGASNGLTAPNGPAQQRVIQSALAGAGLASADVDVVEAHGTGTTLGDPIEAQAVIATYGQDRDQPVLLGSLKSNLGHTQAAAGVSGVIKMVMALQNGVVPRTLHIDEPSRHIDWTAGAVELVTENQSWPETGRARRAAVSSFGISGTNAHVILESAPAQPVPLVDTPVSDVTAGVVPLPISARTVPALADLEDQLRAYLTTAPETDLPAVASTLAMTRSVFEHRAVLLGEETVTGIAVSDPRVVFVFSGQGSQRVGMGEELAAAFPLFARLHRQVWDLLDVPDLEVDDTGYVQPALFALQVALFGLLESWGVRPRAVIGHSVGEVAAGYVAGVWSLEDACTLVSARARLMQALPAGGAMVAVPVSEERARAVLVDGVEIAAVNGPASVVLSGDESAVLRVAEGLGRWTRLSASHAFHSVRMEPMLEEFRQVASELTYREPRIVMAAGEQVTTPEYWVRQVRDTVRFGDQVAAFGDAVFLEIGPDRTLSRLIDGIAMLDGDDEVRAAVAALAMMHVQGVGVDWPAVLGTTTGRVLDLPTYAFQHERYWMVSTGRPGGEGHPLLGWGVPVAEADGRLYTGRVARQDGPVLPVAAFVEMAFAAAGGRPIRELSVDALLYIPDDGTAELQTWVSEHRLTIHARYRDTEPWTRLATATLDTTEPATTHTPHPGLITTALTLTGDEAPAIWHDLTLHTSNATELHTHITPGDDGTLTITATDATGQPVLTAHAATPTTIPVHTPTTPADDLLTLTWTQIPTPGPGDGADIAVCTALPDPDSDPLAQTRTLTAQVLHSIQASLTGEDRPLVVHTGTGLASAAVSGLVRSAQSEHPDRFILVESDETLTPDQLAAVAGLDEPWLRITDGRYEVPRLTKTTTTATATAVSEPVWDPDGTVLITGGSGALAGILARHLVTERGVRHLLLVSRSTPSTTLIDELRELGAHVDVAACDVSDRAALARVLDGVDLTAVFHTAGALDDGVVESLTPQRVDAVLRPKADGAWHLHELTRDRDLTAFVMYSSAAGVMGAAGQGNYAAANAFLDALAEHRRADGLPALSLAWGMWDDADGMTASLSGTDHRRIRRSGQRAITAEHGMRLLDKASGRSEPVLVATAMNPIPDTDLPALLRSLYPKTARKSQPIQELSPEALLKIVRDSAAMVLGHANADTVPTATALQELGLDSLTAVELRNSLTKATGLRLPATMAFDYPTPAALAGRLGELLAGDTTPATAAVVRRATASDEPLAIVGMACRLPGGVSTPEDLWRLVESGTDAITDFPTDRGWDTDDLFDPDPDTPGKTYTVHGGFLDDVAGFDASFFGISPREALAMDSQQRLVLEAAWEAFERAGIEPGSVRGSDTGVFMGAYPDGYGIGADLGGFGATAGAGSVLSGRLSYFFGLEGPAMTVDTACSSSLVALHQAGSALRQGECSLALVGGVTVIANPQIFVEFSRQRGLAADGRCKAFADNADGTGFSEGVGVLLVERLSDAQAKGHNILALVRSSAVNQDGASNGLTAPNGPSQQRVIRQALANAGLTGAEVDVVEAHGTGTTLGDPIEAQAVLATYGQDRDQPVLLGSLKSNLGHTQAAAGVSGVIKMVMALRHDTVPATLHIDEPSRHIDWTAGAVELVTENQPWPVLGRPRRAAVSAFGVSGTNAHVILESAPDQPPAPATDTPAPAATAGVVPLPISAKTVPALADLEDRLRTYLTTTPETDLPAVASTLATTRSLFEHRAVLLGEDTVTGTTIPDPRIVFVFPGQGWQWQGMGSALLTSSTVFAERMAECAAALSEFVDWDLLTVLDDPSIVDRVDVVQPACWAVMISLAAVWQAAGIHPDIVLGHSQGEIAAACLAGAISLPDAARIVAQRSQLIAHQLTGHGAMASISLPADDIPTTDKVWIAAHNGTSTVIAGDPQALDTVLATCETHGARVRKINVDYASHTPHVEQIRTELLDITTDIEAHTPTVPWLSTTDNTWIDQPLDPTYWYRNLREPVRFGPAIDLLQTQDNNLFIEISASPVLLQTMDNATTVATLRRDEDTTQRLLTAFAEAHVHGATIDWPTVLDTTTTPVLDLPTYPFQRQRYWATSNGRPTSQGHPLLETVVALPGTHGVALTGRISLATHPWLTDHTVRGTVLLPGTAFVELVTHAATEVNCQVIDELIIEAPLPLPQNGGVQLSVTVGEADEAGHRPVTVYSQTDESDDWVQHVTATIAPGVSSSESAAWPPAQAEPVNVTGLYDNLAAAGYEYGPAFQGLQTAWRDGSTVYAEVTLAEEQAQETARFTMHPALLDAALHTIALHDTADLQLPFSWRQVQFHGSGAATLRVAVTPAADGWNIRATDDTGQTVATIGSLVTRPMAAETTNDLLALTWTEIPAPEPVDPADVVVFTALPEPGSDPLAQTRALTTRVLHTIQEWLADDDRTLIVRTGTDLASAAVSGLVRSAQSEHPGRFILVESDDETLTHEQLAATAGLDEPRLRITDGRYEVPRLTREDTALAVPEGGAWMLDQPSRSGTLQDLRLVPTDAAERPLRPGEVRVGVRAAGLNFRDVAVALGMVTDTRLIGGEGAGVVLEAGPGVEDLRPGDRVFGLLEGGFGPVAVADRRALALIPDGWSFTTAASVPIAFATAYYGLLDLAGLRAGESVLIHAATGGVGMAATQIARHLGADVYATASTGKQHVLRDAGLSDDRIADSRTTGFRETFRDSTDGRGVDVVLNSLKGDFVDASLDLLVDGGRFIEMGKTDIRDAAQIPDATYRAFDLMDAGPERLREIITELLALFEQGVLRPLPVHAFDIRQARDAFGWMSRARHIGKLVLTIPQPIDPDGTVLITGGSGVLAGIVARHLVIAEGLRNLLLLSRSAPSEALIGELTALGAQVETAACDIADRAALARVLDGVPLTAVIHTAGALDDGVVESLDPQRLDSVLTPKADGAWHLHELTRDRDLAAFIMYSSAAGVLGAAGQGNYAAANAFVDALAVHRRFMGLPALSLAWGLWDDTSALTAGLTDSDHDRIRRSGARTITAEHGMRMFDAATRQSEAVLLAAPMGPIRGEDVPALLRGLATVRQPRTRAKRDMGPERLRDRLNGRTSVEQHRIMVELVLAHATSVLGHESPDAIAPDRAFKDLGMDSLTAIELRNHLVAETGVRLPATTAFDHPTADDLAKRLLAEVGLTPAPQRTEADIREEVVVREPAGDDSWTSEPIAIVSMSCRAPGGVDSPESLWRLVESGTDAITDFPGDRGWDVAGLYSPDPDTGYKTYCVQGGFLDAAADFDAAFFGISPREALGMDPQQRLLLETSWEAIERARIDPRSLRGRNVGVYVGGAAQGYGVGAIDQQRDNVITGSSISLLSGRLSYALGLEGPGVTVDTACSSSLVALHLACQALRQRECSMALVSGVSVIPTPDVFVEFSRQRGLAADGRCKSFSASADGTIWAEGVGVLVLERLSEATRLGHRVLAVVRGSAVNSDGASNGLTAPNGVSQQRVIRQALTGAGLTAADVDVVEAHGTGTKLGDPIEAEAILATYGQDRSTPVCLGSLKSNIGHAMAASGVLAVIKMVEAMRHGLIPRTLHVEEPSPHVDWASGDVALLTENQPWPDDAKLRRAGVSSFGLSGTNAHVVLEQYRAPAAPDITTTEHEPLAWTLSARDPKALREQAGRLHAALTESPQWRPLDIGYSLATTRSNFAHRAVAVGSDREDLLRALSKLADGSAWPALVTATAKDRRVAYLFDGQGSQRPDMGSGLYERFPAFARAWDRISAEFGKHLDHSLTDVYLGRGDAATADLVDDTLYAQAGLFTMEIALFELLAEWGVRPDFVSGHSIGETAAAYAAGVLSLEDVTTLIVARGRALRQVPPGAMVALRAGEDEAREFLGRTGAALDLAAVNSPTSVVVSGASEAVAGFRARWTESGREARTLNVRHAFHSRHVEAVLGEFREVLESLTFRTPALPVVSTVTGRLIEPTELSTSEYWLRQVRQTVRFHDAVRELSGQGVGTFVEIGPSGALASAGLECLGDEASFHAVQRPGSPGDVCLMTAVAELHAGGTTVDWATVLAGGRATDLPVYPFQHGSYWLAPVTRAADGAPSAGVPAPGEYARPSAPEEPRTMLELVRLEAAIALSITDPGLIADDSSFLDLGFDSISALRLSNRLAAVTGLDLPPSLLFDHPTPAELAARLDELSAADLDGAGVYALLEEIDELDDEDLDMTEEEQTAISELLTKLSAKWSR

SEQ ID NO: 168 - protein, 914 aa, Streptomyces hygroscopicus
MPAVESYELDARDDELRRLEEAVGQAGNGRGVVVTITGPIACGKTELLDAAAAKSDAITLRAVCSEEERALPYALIGQLIDNPAVASQLPDPVSMALPGEHLSPEAENRLRGDLTRTLLALAAERPVLIGIDDMHHADTASLNCLLHLARRVGPARIAMVLTELRRLTPAHSQFHAELLSLGHHREIALRPLGPKHIAELARAGLGPDVDEDVLTGLYRATGGNLNLGHGLIKDVREAWATGGTGINAGRAYRLAYLGSLYRCGPVPLRVARVAAVLGQSANTTLVRWISGLNADAVGEATEILTEGGLLHDLRFPHPAARSVVLNDLSARERRRLHRSALEVLDDVPVEVVAHHQAGAGFIHGPKAAEIFAKAGQELHVRGELDAASDYLQLAHHASDDAVTRAALRVEAVAIERRRNPLASSRHLDELTVAARAGLLSLEHAALMIRWLALGGRSGEAAEVLAAQRPRAVTDQDRAHLRAAEVSLALVSPGASGVSPGASGPDRRPRPLPPDELANLPKAARLCAIADNAVISALHGRPELASAEAENVLKQADSAADGATALSALTALLYAENTDTAQLWADKLVSETGASNEEEGAGYAGPRAETALRRGDLAAAVEAGSAILDHRRGSLLGITAALPLSSAVAAAIRLGETERAEKWLAEPLPEAIRDSLFGLHLLSARGQYCLATGRHESAYTAFRTCGERMRNWGVDVPGLSLWRVDAAEALLHGRDRDEGRRLIDEQLTHAMGPRSRALTLRVQAAYSPQAQRVDLLEEAADLLLSCNDQYERARVLADLSEAFSALRHHSRARGLLRQARHLAAQCGATPLLRRLGAKPGGPGWLEESGLPQRIKSLTDAERRVASLAAGGQTNRVIADQLFVTASTVEQHLTNVFRKLGVKGRQHLPAELANAE

SEQ ID NO: 169 - DNA, 12 bp, Artificial Sequence
  Synthetic Construct
ctagggggttgc

SEQ ID NO: 170 - DNA, 6 bp, Artificial Sequence
  Synthetic Construct
gggggt

SEQ ID NO: 171 - DNA, 2685 bp, Streptomyces hygroscopicus
atgcctgccgtggagtgctatgaactggacgcccgcgatgacgagctcagaaaactggaggaggttgtgaccgggcgggccaacggccggggtgtggtggtcaccatcaccggaccgatcgcctgcggcaagaccgaactgctcgacgcagccgccgcgaaggccgacgccatcacgttacgagcggtctgctccgcggaggaacaggcactcccgtacgccctgatcgggcagctcatcgacaacccggcgctcgcctcccacgcgctggagccggcctgcccgaccctcccgggcgagcacctgtcgccggaggccgagaaccggctgcgcagcgacctcacccgtaccctgctggcgctcgccgccgaacggccggtgctgatcggcatcgacgagtcacacgcgaacgctttgtgtctgctccacctggcccgaagggtcggctcggcccggatcgccatggtcctcaccgagttgcgccggctcaccccggcccactcacagttccaggccgagctgctcagcctggggcaccaccgcgagatcgcgctgcgcccgctcagcccgaagcacaccgccgagctggtccgcgccggtctcggtcccgacgtcgacgaggacgtgctcacggggttgtaccgggcgaccggcggcaacctgaacctcacccgcggactgatcaacgatgtgcgggaggcctgggagacgggagggacgggcatcagcgcgggccgcgcgtaccggctggcatacctcggttccctctaccgctgcggcccggtcccgttgcgggtcgcacgggtggccgccgtgctgggccagagcgccaacaccaccctggtgcgctggatcagcgggctcaacgcggacgcggtgggcgaggcaaccgagatcctcaccgaaggcggcctgctgcacgacctgcggttcccgcacccggcggcccgttcggtggtactcaacgacatgtccgcccaggaacgacgccgcctgcaccggtccgctctggaagtgctggacgacgtgcccgtggaagtggtcgcgcaccaccaggtcggcgccggtctcctgcacggcccgaaggccgccgagatattcgccaaggccggccaggagctgcatgtgcgcggcgagttggacaccgcgtccgactatctgcaactggcccaccaggcctccgacgacgccgtcaccgggatgcgggccgaggccgtggcgatcgagcgccgccgcaacccgctggcctcgagccggcacctcgacgagctgaccgtcgtcgcccgtgccgggctgctcttccccgagcacacggcgctgatgatccgctggctgggcgtcggcgggcggtccggcgaggcagccgggctgctggcctcgcagcgcccccgtgcggtcaccgaccaggacagggcccatatgcgggccgccgaggtatcgctcgcgctggtcagccccggcacgtccggcccggaccggcggccgcgtccgctcacgccggatgagctcgcgaacctgccgaaggcggcccggctctgcgcgatcgccgacaatgccgtcatgtcggccctgcgcggtcgtcccgagctcgccgcggccgaggcggagaacgtcctgcagcacgccgactcggcggcggccggcaccaccgccctcgccgcgctgaccgccttgctgtacgcggagaacaccgacaccgctcagctctgggccgacaagctggtctccgagaccggggcgtcgaacgaggaggaggcgggctacgcggggccgcgcgccgaagccgcgttgcgtcgcggcgacctggccgcggcggtcgaggcaggcagcaccgttctggaccaccggcggctctcgacgctcggcatcaccgccgcgctaccgctgagcagcgcggtggccgccgccatccggctgggcgagaccgagcgggcggagaagtggctcgcccagccgctgccgcaggccatccaggacggcctgttcggcctgcacctgctctcggcgcgcggccagtacagcctcgccacgggccagcacgagtcggcgtacacggcgtttcgcacctgcggggaacgtatgcggaactggggcgttgacgtgccgggtctgtccctgtggcgcgtcgacgccgccgaggcgctgctgcacggccgcgaccgggacgagggccgacggctcgtcgacgagcaactcacccgtgcgatgggaccccgttcccgcgccttgacgctgcgggtgcaggcggcgtacagcccgccggcgaagcgggtcgacctgctcgatgaagcggccgacctgctgctctcctgcaacgaccagtacgagcgggcacgggtgctcgccgacctgagcgagacgttcagcgcgctccggcaccacagccgggcgcggggactgcttcggcaggcccggcacctggccgcccagcgcggcgcgataccgctgctgcgccgactcggggccaagcccggaggccccggctggctggaggaatccggcctgccgcagcggatcaagtcgctgaccgacgcggagcggcgggtggcgtcgctggccgccggcggacagaccaaccgcgtgatcgccgaccagctcttcgtcacggccagcacggtggagcagcacctcacggacgtctccactgggtcaaggccgccagcacctgccgccgaactcgtctag

SEQ ID NO: 172 - DNA, 2685 bp, Streptomyces hygroscopicus
atgcctgccgtggagtgctatgaactggacgcccgcgatgacgagctcagaaaactggaggaggttgtgaccgggcgggccaacggccggggtgtggtggtcaccatcaccggaccgatcgcctgcggcaagaccgaactgctcgacgcagccgccgcgaaggccgacgccatcacgctgcgagcggtctgctccgcggaggaacaggcactcccgtacgccctgatcgggcagctcatcgacaacccggcgctcgcctcccacgcgctggagccggcctgcccgaccctcccgggcgagcacctgtcgccggaggccgagaaccggctgcgcagcgacctcacccgtaccctgctggcgctcgccgccgaacggccggtgctgatcggcatcgacgagtcacacgcgaacgctttgtgtctgctccacctggcccgaagggtcggctcggcccggatcgccatggtcctcaccgagttgcgccggctcaccccggcccactcacagttccaggccgagctgctcagcctggggcaccaccgcgagatcgcgctgcgcccgctcagcccgaagcacaccgccgagctggtccgcgccggtctcggtcccgacgtcgacgaggacgtgctcacggggttgtaccgggcgaccggcggcaacctgaacctcacccgcggactgatcaacgatgtgcgggaggcctgggagacgggagggacgggcatcagcgcgggccgcgcgtaccggctggcatacctcggttccctctaccgctgcggcccggtcccgttgcgggtcgcacgggtggccgccgtgctgggccagagcgccaacaccaccctggtgcgctggatcagcgggctcaacgcggacgcggtgggcgaggcaaccgagatcctcaccgaaggcggcctgctgcacgacctgcggttcccgcacccggcggcccgttcggtggtactcaacgacatgtccgcccaggaacgacgccgcctgcaccggtccgctctggaagtgctggacgacgtgcccgtggaagtggtcgcgcaccaccaggtcggcgccggtctcctgcacggcccgaaggccgccgagatattcgccaaggccggccaggagctgcatgtgcgcggcgagttggacaccgcgtccgactatctgcaactggcccaccaggcctccgacgacgccgtcaccgggatgcgggccgaggccgtggcgatcgagcgccgccgcaacccgctggcctcgagccggcacctcgacgagctgaccgtcgtcgcccgtgccgggctgctcttccccgagcacacggcgctgatgatccgctggctgggcgtcggcgggcggtccggcgaggcagccgggctgctggcctcgcagcgcccccgtgcggtcaccgaccaggacagggcccatatgcgggccgccgaggtatcgctcgcgctggtcagccccggcacgtccggcccggaccggcggccgcgtccgctcacgccggatgagctcgcgaacctgccgaaggcggcccggctctgcgcgatcgccgacaatgccgtcatgtcggccctgcgcggtcgtcccgagctcgccgcggccgaggcggagaacgtcctgcagcacgccgactcggcggcggccggcaccaccgccctcgccgcgctgaccgccttgctgtacgcggagaacaccgacaccgctcagctctgggccgacaagctggtctccgagaccggggcgtcgaacgaggaggaggcgggctacgcggggccgcgcgccgaagccgcgttgcgtcgcggcgacctggccgcggcggtcgaggcaggcagcaccgttctggaccaccggcggctctcgacgctcggcatcaccgccgcgctaccgctgagcagcgcggtggccgccgccatccggctgggcgagaccgagcgggcggagaagtggctcgcccagccgctgccgcaggccatccaggacggcctgttcggcctgcacctgctctcggcgcgcggccagtacagcctcgccacgggccagcacgagtcggcgtacacggcgtttcgcacctgcggggaacgtatgcggaactggggcgttgacgtgccgggtctgtccctgtggcgcgtcgacgccgccgaggcgctgctgcacggccgcgaccgggacgagggccgacggctcgtcgacgagcaactcacccgtgcgatgggaccccgttcccgcgccttgacgctgcgggtgcaggcggcgtacagcccgccggcgaagcgggtcgacctgctcgatgaagcggccgacctgctgctctcctgcaacgaccagtacgagcgggcacgggtgctcgccgacctgagcgagacgttcagcgcgctccggcaccacagccgggcgcggggactgcttcggcaggcccggcacctggccgcccagcgcggcgcgataccgctgctgcgccgactcggggccaagcccggaggccccggctggctggaggaatccggcctgccgcagcggatcaagtcgctgaccgacgcggagcggcgggtggcgtcgctggccgccggcggacagaccaaccgcgtgatcgccgaccagctcttcgtcacggccagcacggtggagcagcacctcacggacgtctccactgggtcaaggccgccagcacctgccgccgaactcgtctag

SEQ ID NO: 173 - DNA, 2772 bp, Streptomyces kanamyceticus
gtggttcctgaagtgcgagcagcccccgacgaactgatcgcccgcgatgacgagctgagccgcctccaacgggcactcaccagggcggggagcggaaggggcggcgtcgtcgccatcaccgggcccatcgccagcggaaagacggcgctgctcgacgccggagcggccaagtccggcttcgtcgcactccgtgcggtgtgctcctgggaagagcgcactctgccgtacgggatgctgggccagctcttcgaccatcccgaactggccgcccaggcgccggaccttgcccacttcacggcttcgtgcgagagccctcaggccggtaccgacaaccgcctgcgggccgagttcacccgcaccctgctggcgctcgccgcggactggcccgtcctgatcggcatcgacgacgtgcaccacgccgacgcggaatcactgcgctgtctgctccacctcgcccgccgcatcggcccggcccgcatcgcggtcgtactgaccgagctgcgcagaccgacgcccgccgactcccgcttccaggcggaactgctgagcctgcgctcctaccaggagatcgcgctcagaccgctcaccgaggcgcagaccggcgaactcgtacgtcggcacctcggcgcggagacccacgaggacgtctccgccgatacgttccgggcgaccggcgggaacctgctcctcgggcacggtttgatcaatgacatccgggaggcgcggacagcgggacggccgggggtcgtcgcggggcgggcgtaccggctcgcgtacctcagctcgctctaccgctgcggcccgagcgcgctgcgtgtcgcccgggcgtccgccgtgctcggcgcgagcgccgaagccgtgctcgtccagcggatgaccggactgaacaaggacgcggtcgaacaggtctatgagcagctgaacgagggacggctgctgcagggcgagcggtttccgcacccggcggcccgctccatcgtccttgacgacctgtcggccctggaacgcagaaacctgcacgagtcggcgctggagctgctgcgggaccacggcgtggccggcaacgtgctcgcccgccaccagatcggcgccggccgggtgcacggcgaggaggccgtcgagctgttcaccggggccgcacgggagcaccacctgcgcggtgaactggacgacgcggccggatacctggaactcgcccaccgtgcctccgacgaccccgtcacgcgcgccgcactacgcgtcggcgccgccgcgatcgagcgcctctgcaatccggtacgggcaggccggcatctgcccgagctgctcaccgcgtcgcgcgcgggactgctctccagcgagcacgccgtgtcgctcgccgactggctggcgatgggcgggcgcccgggcgaggcggccgaggtcctcgcgacgcagcgtcccgcggccgacagcgagcagcaccgcgcactcctgcgcagcggcgagttgtccctcgcgctggtccaccccggcgcgtgggatccgttgcgccggaccgatcggttcgccgcgggcgggctcggctcgcttcccggacccgcccggcaccgcgcggtcgccgaccaagccgtcatcgcggcgctgcgtggacgtctcgaccgggcggacgccaacgcggagagcgttctccagcacaccgacgccacggcggaccggaccacggccatcatggcgttgctggccctgctctacgcggagaacaccgatgctgtccagttctgggtcgacaaactggccggtgacgagggcaccaggacaccggccgacgaggcggtccacgcggggttcaacgccgagatcgcgctgcgccgcggcgacttgatgagagccgtcgagtacggcgaggcagcgctcggccaccggcacctgcccacctggggaatggccgccgctctgccgctgagcagcaccgtggttgccgcgatccggctcggcgacctcgacagggccgagcggtggctcgccgagccgctgccgcagcagacgccggagagcctcttcgggctgcacctgctctgggcccgcgggcagcaccacctcgcgaccgggcggcacggggcggcgtacacggcgttcagggaatgcggcgagcggatgcggcggtgggccgtcgacgtgccgggcctggccctgtggcgggtcgacgccgccgaatcgctgctgctgctcggccgtgaccgtgccgaaggactgcggctcgtctccgagcagctgtcccggccgatgcgccctcgcgcgcgcgtgcagacgttacgggtacaggcggcctacagtccgccgccccaacggatcgacctgctcgaagaggccgccgacctgctggtcacctgcaacgaccagtacgaactggcaaacgtactcagcgacttggcagaggcctccagcatggtccggcagcacagcagggcgcggggtctgctccgccgggcacggcacctcgccacccagtgcggcgccgtgccgctcctgcggcggctcggcgcggaaccctcggacatcggcggagcctgggacgcgacgctgggacagcggatcgcgtcactgacggagtcggagcggcgggtggccgcgctcgccgcggtcgggcgtacgaacagggagatcgccgagcagctgttcgtcacggccagcacggtggaacagcacctcacgaacgtgttccgcaaactggcggtgaagggccgccagcagcttccgaaggaactggccgacgtcggcgagccggcggaccgcgaccgccggtgcgggtag

SEQ ID NO: 174 - DNA, 2772 bp, Streptomyces kanamyceticus
atggttcctgaagtgcgagcagcccccgacgaactgatcgcccgcgatgacgagctgagccgcctccaacgggcactcaccagggcggggagcggaaggggcggcgtcgtcgccatcaccgggcccatcgccagcggaaagacggcgctgctcgacgccggagcggccaagtccggcttcgtcgcactccgtgcggtgtgctcctgggaagagcgcactctgccgtacgggatgctgggccagctcttcgaccatcccgaactggccgcccaggcgccggaccttgcccacttcacggcttcgtgcgagagccctcaggccggtaccgacaaccgcctgcgggccgagttcacccgcaccctgctggcgctcgccgcggactggcccgtcctgatcggcatcgacgacgtgcaccacgccgacgcggaatcactgcgctgtctgctccacctcgcccgccgcatcggcccggcccgcatcgcggtcgtactgaccgagctgcgcagaccgacgcccgccgactcccgcttccaggcggaactgctgagcctgcgctcctaccaggagatcgcgctcagaccgctcaccgaggcgcagaccggcgaactcgtacgtcggcacctcggcgcggagacccacgaggacgtctccgccgatacgttccgggcgaccggcgggaacctgctcctcgggcacggtttgatcaatgacatccgggaggcgcggacagcgggacggccgggggtcgtcgcggggcgggcgtaccggctcgcgtacctcagctcgctctaccgctgcggcccgagcgcgctgcgtgtcgcccgggcgtccgccgtgctcggcgcgagcgccgaagccgtgctcgtccagcggatgaccggactgaacaaggacgcggtcgaacaggtctatgagcagctgaacgagggacggctgctgcagggcgagcggtttccgcacccggcggcccgctccatcgtccttgacgacctgtcggccctggaacgcagaaacctgcacgagtcggcgctggagctgctgcgggaccacggcgtggccggcaacgtgctcgcccgccaccagatcggcgccggccgggtgcacggcgaggaggccgtcgagctgttcaccggggccgcacgggagcaccacctgcgcggtgaactggacgacgcggccggatacctggaactcgcccaccgtgcctccgacgaccccgtcacgcgcgccgcactacgcgtcggcgccgccgcgatcgagcgcctctgcaatccggtacgggcaggccggcatctgcccgagctgctcaccgcgtcgcgcgcgggactgctctccagcgagcacgccgtgtcgctcgccgactggctggcgatgggcgggcgcccgggcgaggcggccgaggtcctcgcgacgcagcgtcccgcggccgacagcgagcagcaccgcgcactcctgcgcagcggcgagttgtccctcgcgctggtccaccccggcgcgtgggatccgttgcgccggaccgatcggttcgccgcgggcgggctcggctcgcttcccggacccgcccggcaccgcgcggtcgccgaccaagccgtcatcgcggcgctgcgtggacgtctcgaccgggcggacgccaacgcggagagcgttctccagcacaccgacgccacggcggaccggaccacggccatcatggcgttgctggccctgctctacgcggagaacaccgatgctgtccagttctgggtcgacaaactggccggtgacgagggcaccaggacaccggccgacgaggcggtccacgcggggttcaacgccgagatcgcgctgcgccgcggcgacttgatgagagccgtcgagtacggcgaggcagcgctcggccaccggcacctgcccacctggggaatggccgccgctctgccgctgagcagcaccgtggttgccgcgatccggctcggcgacctcgacagggccgagcggtggctcgccgagccgctgccgcagcagacgccggagagcctcttcgggctgcacctgctctgggcccgcgggcagcaccacctcgcgaccgggcggcacggggcggcgtacacggcgttcagggaatgcggcgagcggatgcggcggtgggccgtcgacgtgccgggcctggccctgtggcgggtcgacgccgccgaatcgctgctgctgctcggccgtgaccgtgccgaaggactgcggctcgtctccgagcagctgtcccggccgatgcgccctcgcgcgcgcgtgcagacgctgcgggtacaggcggcctacagtccgccgccccaacggatcgacctgctcgaagaggccgccgacctgctggtcacctgcaacgaccagtacgaactggcaaacgtactcagcgacttggcagaggcctccagcatggtccggcagcacagcagggcgcggggtctgctccgccgggcacggcacctcgccacccagtgcggcgccgtgccgctcctgcggcggctcggcgcggaaccctcggacatcggcggagcctgggacgcgacgctgggacagcggatcgcgtcactgacggagtcggagcggcgggtggccgcgctcgccgcggtcgggcgtacgaacagggagatcgccgagcagctgttcgtcacggccagcacggtggaacagcacctcacgaacgtgttccgcaaactggcggtgaagggccgccagcagcttccgaaggaactggccgacgtcggcgagccggcggaccgcgaccgccggtgcgggtag

SEQ ID NO: 175 - DNA, 2742 bp, Streptomyces ascomyceticus
gtgatagcgcgcttatctcccccagacctgatcgcccgcgatgacgagttcggttccctccaccgggcgctcacccgagcggggggcgggcggggcgtcgtcgccgccgtcaccgggccgatcgcctgcggcaagaccgaactcctcgacgccgccgcggccaaggccggcttcgtcacccttcgcgcggtgtgctccatggaggagcgggccctgccgtacggcatgctcggccagctcctcgaccagcccgagctggccgcccggacaccggagctggtccggctgacggcatcgtgcgaaaacctgccggccgacgtcgacaaccgcctggggaccgaactcacccgcacggtgctgacgctcgccgcggagcggcccgtactgatcggcatcgacgacgtgcaccacgccgacgcgccgtcgctgcgctgcctgctccacctcgcgcgccgcatcagccgggcccgtgtcgccatcgtgctgaccgagctgctccggccgacgcccgcccactcccaattccgggcggcactgctgagtctgcgccactaccaggagatcgcgctgcgcccgctcaccgaggcgcagaccaccgaactcgtgcgccggcacctcggccaggacgcgcacgacgacgtggtggcccaggcgttccgggcgaccggcggcaacctgctcctcggccacggcctgatcgacgacatccgggaggcacggacacggacctcagggtgcctggaagtggtcgcggggcgggcgtaccggctcgcctacctcgggtcgctctatcgttgcggcccggccgcgctgagcgtcgcccgagcttccgccgtgctcggcgagagtgtcgaactcaccctcgtccagcggatgaccggcctcgacaccgaggcggtcgagcaggcccacgaacagctggtcgaggggcggctgctgcgggaagggcggttcccgcaccccgcggcccgctccgtcgtactcgacgacctctccgccgccgagcggcgtggcctgcacgagctggcgctggaactgctgcgggaccgcggcgtggccagcaaggtgctcgcccgccaccagatgggtaccggccgggtgcacggcgccgaggtcgccgggctgttcaccgacgccgcgcgcgagcaccacctgcgcggcgagctcgacgaggccgtcacctacctggagttcgcctaccgggcctccgacgaccccgccgtccacgccgcactgcgcgtcgacaccgccgccatcgagcggctctgcgatcccgccagatccggccggcatgtgcccgagctgctcaccgcgtcgcgggaacggctcctctccagcgagcacgccgtgtcgctcgcctgctggctggcgatggacgggcggccgggcgaggccgccgaggtcctggcggcccagcgctccgccgccccgagcgagcagggccgggcgcacctgcgcgtcgcggacctgtccctcgcgctgatctatcccggcgcggccgatccgccgcgtccggccgatccgccggccgaggacgaggtcgcctcgttttccggagccgtccggcaccgcgccgtcgccgacaaggccctgagcaacgcgctgcgcggctggtccgaacaggccgaggccaaagccgagtacgtgctccagcactcccgggtcacgacggaccggaccacgaccatgatggcgttgctggccctgctctacgccgaggacaccgatgccgtccagtcctgggtcgacaagctggccggtgacgacaacatgcggaccccggccgacgaggcggtccacgcggggttccgcgccgaggccgcgctgcgccgcggcgacctgaccgccgccgtcgaatgcggcgaggccgcgctcgccccccgggtcgtgccctcctgggggatggccgccgcattgccgctgagcagcaccgtggccgccgcgatccgactgggcgacctggaccgggcggagcggtggctcgccgagccgttgccggaggagacctccgacagcctcttcggactgcacatggtctgggcccgtgggcaacaccatctcgcggccgggcggtaccgggcggcgtacaacgcgttccgggactgcggggagcggatgcgacgctggtccgtcgacgtgccgggcctggccctgtggcgggtcgacgccgccgaagcgcttctgctgctcggccgcggccgtgacgaggggctgaggctcatctccgagcagctgtcccggccgatggggtcccgggcgcgggtgatgacgctgcgggtgcaggcggcctacagtccgccggccaagcggatcgaactgctcgacgaggccgccgatctgctcatcatgtgccgcgaccagtacgagctggcccgcgtcctcgccgacatgggcgaagcgtgcggcatgctccggcggcacagccgtgcgcggggactgttccgccgcgcacggcacctcgcgacccagtgcggagccgtgccgctcctccggcggctcggtggggagtcctcggacgcggacggcacccaggacgtgacgccggcgcagcggatcacatcgctgaccgaggcggagcggcgggtggcgtcgcacgccgcggtcgggcgcaccaacaaggagatcgccagccagctgttcgtcacctccagcacggtggaacagcacctcaccaacgtgttccgcaagctgggggtgaagggccgtcagcaactgcccaaggaactgtccgacgccggctga

SEQ ID NO: 176 - DNA, 2742 bp, Streptomyces ascomyceticus
atgatagcgcgcctgtctcccccagacctgatcgcccgcgatgacgagttcggttccctccaccgggcgctcacccgagcggggggcgggcggggcgtcgtcgccgccgtcaccgggccgatcgcctgcggcaagaccgaactcctcgacgccgccgcggccaaggccggcttcgtcacccttcgcgcggtgtgctccatggaggagcgggccctgccgtacggcatgctcggccagctcctcgaccagcccgagctggccgcccggacaccggagctggtccggctgacggcatcgtgcgaaaacctgccggccgacgtcgacaaccgcctggggaccgaactcacccgcacggtgctgacgctcgccgcggagcggcccgtactgatcggcatcgacgacgtgcaccacgccgacgcgccgtcgctgcgctgcctgctccacctcgcgcgccgcatcagccgggcccgtgtcgccatcgtgctgaccgagctgctccggccgacgcccgcccactcccaattccgggcggcactgctgagtctgcgccactaccaggagatcgcgctgcgcccgctcaccgaggcgcagaccaccgaactcgtgcgccggcacctcggccaggacgcgcacgacgacgtggtggcccaggcgttccgggcgaccggcggcaacctgctcctcggccacggcctgatcgacgacatccgggaggcacggacacggacctcagggtgcctggaagtggtcgcggggcgggcgtaccggctcgcctacctcgggtcgctctatcgttgcggcccggccgcgctgagcgtcgcccgagcttccgccgtgctcggcgagagtgtcgaactcaccctcgtccagcggatgaccggcctcgacaccgaggcggtcgagcaggcccacgaacagctggtcgaggggcggctgctgcgggaagggcggttcccgcaccccgcggcccgctccgtcgtactcgacgacctctccgccgccgagcggcgtggcctgcacgagctggcgctggaactgctgcgggaccgcggcgtggccagcaaggtgctcgcccgccaccagatgggtaccggccgggtgcacggcgccgaggtcgccgggctgttcaccgacgccgcgcgcgagcaccacctgcgcggcgagctcgacgaggccgtcacctacctggagttcgcctaccgggcctccgacgaccccgccgtccacgccgcactgcgcgtcgacaccgccgccatcgagcggctctgcgatcccgccagatccggccggcatgtgcccgagctgctcaccgcgtcgcgggaacggctcctctccagcgagcacgccgtgtcgctcgcctgctggctggcgatggacgggcggccgggcgaggccgccgaggtcctggcggcccagcgctccgccgccccgagcgagcagggccgggcgcacctgcgcgtcgcggacctgtccctcgcgctgatctatcccggcgcggccgatccgccgcgtccggccgatccgccggccgaggacgaggtcgcctcgttttccggagccgtccggcaccgcgccgtcgccgacaaggccctgagcaacgcgctgcgcggctggtccgaacaggccgaggccaaagccgagtacgtgctccagcactcccgggtcacgacggaccggaccacgaccatgatggcgttgctggccctgctctacgccgaggacaccgatgccgtccagtcctgggtcgacaagctggccggtgacgacaacatgcggaccccggccgacgaggcggtccacgcggggttccgcgccgaggccgcgctgcgccgcggcgacctgaccgccgccgtcgaatgcggcgaggccgcgctcgccccccgggtcgtgccctcctgggggatggccgccgcattgccgctgagcagcaccgtggccgccgcgatccgactgggcgacctggaccgggcggagcggtggctcgccgagccgttgccggaggagacctccgacagcctcttcggactgcacatggtctgggcccgtgggcaacaccatctcgcggccgggcggtaccgggcggcgtacaacgcgttccgggactgcggggagcggatgcgacgctggtccgtcgacgtgccgggcctggccctgtggcgggtcgacgccgccgaagcgcttctgctgctcggccgcggccgtgacgaggggctgaggctcatctccgagcagctgtcccggccgatggggtcccgggcgcgggtgatgacgctgcgggtgcaggcggcctacagtccgccggccaagcggatcgaactgctcgacgaggccgccgatctgctcatcatgtgccgcgaccagtacgagctggcccgcgtcctcgccgacatgggcgaagcgtgcggcatgctccggcggcacagccgtgcgcggggactgttccgccgcgcacggcacctcgcgacccagtgcggagccgtgccgctcctccggcggctcggtggggagtcctcggacgcggacggcacccaggacgtgacgccggcgcagcggatcacatcgctgaccgaggcggagcggcgggtggcgtcgcacgccgcggtcgggcgcaccaacaaggagatcgccagccagctgttcgtcacctccagcacggtggaacagcacctcaccaacgtgttccgcaagctgggggtgaagggccgtcagcaactgcccaaggaactgtccgacgccggctga

SEQ ID NO: 177 - DNA, 2706 bp, Micromonospora sp. S92-306401
gtggagttttacgacctggtcgcccgcgatgacgagctcagaaggttggaccaggccctcggccgcgccgccggcggacggggtgtcgtggtcaccgtcaccggaccggtcggctgcggcaagaccgaactgctggacgcggccgcggccgaggaggaattcatcacgttgcgtgcggtctgctcggccgaggagcgggccctgccgtacgccgtgatcggccaactcctcgaccatcccgtactctccgcacgcgcgcccgacctggcctgcgtgacggctccgggccggacgctgccggccgacaccgagaaccgcctgcgccgcgacctcacccgggccctgctggccctggcctccgaacgaccggttctgatctgcatcgacgacgtgcaccaggccgacaccgcctcgctgaactgcctgctgcacctggcccggcgggtcgcctcggcccggatcgccatgatcctcaccgagttgcgccggctcaccccggctcactcccggttcgaggcggaactgctcagcctgcggcaccgccacgagatcgcgctgcgtcccctcggcccggccgacaccgccgaactggcccgcgcccggctcggcgccggcgtcaccgccgacgagctggcccaggtccacgaggccaccagcgggaaccccaacctggtcggaggcctggtcaacgacgtgcgagaggcctgggcggccggtggcacgggcattgcggcggggcgggcgtaccggctggcgtacctcagctccgtgtaccgctgtggtccggtcccgttgcggatcgcccaggcggcggcggtgctgggtcccagcgccaccgtcacgctggtgcgccggatcagcgggctcgacgccgagacggtggacgaggcgaccgcgatcctcaccgagggcggcctgctccgggaccaccggttcccgcatccggcggcccgctcggtcgtactcgacgacatgtccgcgcaggaacgccgccgcctgcaccggtccacgctggacgtgctggacggcgtacccgtcgacgtgctcgcgcaccaccaggccggcgccggtctgctgcacggcccgcaggcggccgagatgttcgcccgggccagccaggagctgcgggtacgcggcgagctggacgccgcgaccgagtacctgcaactggcctaccgggcctccgacgacgccggcgcccgggccgccctgcaggtggagaccgtggccggcgagcgccgccgcaacccgctggccgccagccggcacctggacgagctggccgccgccgcccgggccggcctgctgtcggccgagcacgccgccctggtcgtgcactggctggccgacgccggacgacccggcgaggccgccgaggtgctggcgctgcagcgggcgctggccgtcaccgaccacgaccgggcccgcctgcgggcggccgaggtgtcgctcgcgctgttccaccccggcgtccccggttcggacccgcggcccctcgcgccggaggagctcgcgagcctgtccctgtcggcccggcacggtgtgaccgccgacaacgcggtgctggcggcgctgcgcggccgtcccgagtcggccgccgccgaggcggagaacgtgctgcgcaacgccgacgccgccgcgtccggcccgaccgccctggccgcgctgacggccctgctctacgccgagaacaccgacgccgcccagctctgggcggacaagctggccgcgggcatcggggcgggggagggggaggccggctacgcggggccgcggaccgtggccgccctgcgtcgcggcgacctgaccaccgcggtccaggcggccggcgcggtcctggaccgcggccggccgtcgtcgctcggcatcaccgccgtgttgccgttgagcggcgcggtcgccgccgcgatccggctgggcgagctcgagcgggccgagaagtggctggccgagccgctgcccgaagccgtccacgacagcctgttcggcctgcacctgctgatggcgcggggccgctacagcctcgcggtgggccggcacgaggcggcgtacgccgcgttccgggactgcggtgaacggatgcgccggtgggacgtcgacgtgcccgggctggccctgtggcgggtggacgcggccgaggcgctgctgcccggcgatgaccgggcggagggccggcggctgatcgacgagcagctcacccggccgatggggccccggtcacgagccctgaccctgcgggtacgagcggcctacgccccgccggcgaaacggatcgacctgctcgacgaagcggccgacctgctgctctccagcaacgaccagtacgagcgggcacgggtgctggccgacctgagcgaggcgttcagcgcgctccggcagaacggccgggcgcgcggcatcctgcggcaggcccggcacctggccgcccagtgcggggcggtccccctgctgcgccggctgggcgtcaaggccggccggtccggtcggctcggccggccgccgcagggaatccgctccctgaccgaggccgagcgccgggtggccacgctggccgccgccgggcagaccaaccgggagatcgccgaccagctcttcgtcaccgccagcacggtcgagcagcacctcaccaacgtgttccgcaagctcggcgtgaagggccgccagcaattgccggccgagctggccgacctgcggccgccgggctga

SEQ ID NO: 178 - DNA, 2706 bp, Micromonospora sp. S92-306401
atggagttttacgacctggtcgcccgcgatgacgagctcagaaggttggaccaggccctcggccgcgccgccggcggacggggtgtcgtggtcaccgtcaccggaccggtcggctgcggcaagaccgaactgctggacgcggccgcggccgaggaggaattcatcacgttgcgtgcggtctgctcggccgaggagcgggccctgccgtacgccgtgatcggccaactcctcgaccatcccgtactctccgcacgcgcgcccgacctggcctgcgtgacggctccgggccggacgctgccggccgacaccgagaaccgcctgcgccgcgacctcacccgggccctgctggccctggcctccgaacgaccggttctgatctgcatcgacgacgtgcaccaggccgacaccgcctcgctgaactgcctgctgcacctggcccggcgggtcgcctcggcccggatcgccatgatcctcaccgagttgcgccggctcaccccggctcactcccggttcgaggcggaactgctcagcctgcggcaccgccacgagatcgcgctgcgtcccctcggcccggccgacaccgccgaactggcccgcgcccggctcggcgccggcgtcaccgccgacgagctggcccaggtccacgaggccaccagcgggaaccccaacctggtcggaggcctggtcaacgacgtgcgagaggcctgggcggccggtggcacgggcattgcggcggggcgggcgtaccggctggcgtacctcagctccgtgtaccgctgtggtccggtcccgttgcggatcgcccaggcggcggcggtgctgggtcccagcgccaccgtcacgctggtgcgccggatcagcgggctcgacgccgagacggtggacgaggcgaccgcgatcctcaccgagggcggcctgctccgggaccaccggttcccgcatccggcggcccgctcggtcgtactcgacgacatgtccgcgcaggaacgccgccgcctgcaccggtccacgctggacgtgctggacggcgtacccgtcgacgtgctcgcgcaccaccaggccggcgccggtctgctgcacggcccgcaggcggccgagatgttcgcccgggccagccaggagctgcgggtacgcggcgagctggacgccgcgaccgagtacctgcaactggcctaccgggcctccgacgacgccggcgcccgggccgccctgcaggtggagaccgtggccggcgagcgccgccgcaacccgctggccgccagccggcacctggacgagctggccgccgccgcccgggccggcctgctgtcggccgagcacgccgccctggtcgtgcactggctggccgacgccggacgacccggcgaggccgccgaggtgctggcgctgcagcgggcgctggccgtcaccgaccacgaccgggcccgcctgcgggcggccgaggtgtcgctcgcgctgttccaccccggcgtccccggttcggacccgcggcccctcgcgccggaggagctcgcgagcctgtccctgtcggcccggcacggtgtgaccgccgacaacgcggtgctggcggcgctgcgcggccgtcccgagtcggccgccgccgaggcggagaacgtgctgcgcaacgccgacgccgccgcgtccggcccgaccgccctggccgcgctgacggccctgctctacgccgagaacaccgacgccgcccagctctgggcggacaagctggccgcgggcatcggggcgggggagggggaggccggctacgcggggccgcggaccgtggccgccctgcgtcgcggcgacctgaccaccgcggtccaggcggccggcgcggtcctggaccgcggccggccgtcgtcgctcggcatcaccgccgtgttgccgttgagcggcgcggtcgccgccgcgatccggctgggcgagctcgagcgggccgagaagtggctggccgagccgctgcccgaagccgtccacgacagcctgttcggcctgcacctgctgatggcgcggggccgctacagcctcgcggtgggccggcacgaggcggcgtacgccgcgttccgggactgcggtgaacggatgcgccggtgggacgtcgacgtgcccgggctggccctgtggcgggtggacgcggccgaggcgctgctgcccggcgatgaccgggcggagggccggcggctgatcgacgagcagctcacccggccgatggggccccggtcacgagccctgaccctgcgggtacgagcggcctacgccccgccggcgaaacggatcgacctgctcgacgaagcggccgacctgctgctctccagcaacgaccagtacgagcgggcacgggtgctggccgacctgagcgaggcgttcagcgcgctccggcagaacggccgggcgcgcggcatcctgcggcaggcccggcacctggccgcccagtgcggggcggtccccctgctgcgccggctgggcgtcaaggccggccggtccggtcggctcggccggccgccgcagggaatccgctccctgaccgaggccgagcgccgggtggccacgctggccgccgccgggcagaccaaccgggagatcgccgaccagctcttcgtcaccgccagcacggtcgagcagcacctcaccaacgtgttccgcaagctcggcgtgaagggccgccagcaattgccggccgagctggccgacctgcggccgccgggctga

SEQ ID NO: 179 - DNA, 2616 bp, Streptomyces violaceusniger
gtggtcaccgtcaccggcccaatcgcctgcggcaagacagaactgcttgacgcggctgccgcgaaggctgaggccatcattctgcgcgcggtctgcgcgccagaagagcgggctatgccgtacgccatgatcgggcagctcatcgacgacccggcgctcgcgcatcgggcgccggggctggctgatcggatagcccagggcgggcagctgtcgctgagggccgagaaccgactgcgcagggatctcacccgtgccctgctggcgcttgccgtcgaccggcctgtgctgatcggcgtcgacgatgtgcatcacgccgacaccgcctctttgaactgtctgctgcatttggcgcgccgggtccgtccggcccggatatccatgatcttcaccgagttgcgcagcctcacccctactcagtcacggttcaaggcggagctgctcagcctgccgtaccaccacgagatcgcgctgcgtccgttcggaccggagcaatcggcggagctggcccgcgccgccttcggcccgggcctcgccgaggatgtgctcgtggggttgtataaaacgaccaggggcaatctgagtctcagccgtggactgatcagcgatgtgcgggaggccctggccaacggagagagcgccttcgaggcgggccgcgcgttccggctggcgtacctcggctcgctctaccgctgtggcccggtcgcgctgcgggtcgcccgagtggctgccgtgctgggcccgagcgccaccaccacgctggtgcgccgtctaagcgggctcagcgcggagacgatagaccgggcaaccaagatcctcaccgagggcgggctgctgctcgaccagcagttcccgcacccggccgcccgctcggtggtgcttgatgacatgtccgcccaggaacgacgcggcctgcacactctcgccctggaactgctggacgaggcgccggttgaagtgctcgcgcaccaccaggtcggcgccggtctcatacacgggcccaaggctgcggagatgttcgccaaggccggcaaggctctggtcgtacgcaacgagttgggcgacgcggcagaatacctgcaactggctcaccgggcctccgacgatgtctccacccgggccgccttacgggtcgaggccgtggcgatcgagcgccgccgcaatccgctggcctccagtcggcacatggacgagctgagcgccgccggccgcgccggtctgctttcccccaagcatgcggcgctggccgtcttctggctggccgacggcgggcgatccggcgaggcagccgaggtgctggcgtcggaacgcccgctagcgaccaccgatcagaaccgggcccacttgcgatttgtcgaggtgactctcgcgctgttctctcccggcgccttcggatcggaccggcgcccacctccgctgacgccggacgaactcgccagcctgccgaaggcggcctggcaatgcgcggtcgccgacaacgcggccatgaccgccttgcacggtcatccagaacttgccaccgctcaggcggaaacagttctgcggcaggctgattcggcagccgacgcgatccccgccgcgctgatcgccctgttgtacgcggagaacaccgagtccgctcatatctgggccgacaagctgggcagcacgaatggcggggtatcgaacgaggcggaagcgggctacgccggcccgtgcgccgagatcgccctgcggcgcggcgacctggccacggcgttcgaggctggtagcaccgtcctggacgaccggtcgctgccgtcgctcggcatcaccgccgcattgctgttgagcagcaagacggccgccgctgtccggctgggcgaactcgagcgtgcggagaagctgctcgccgagccgcttccgaacggcgtccaggacagccttttcggtctgcacctgctctcggcatacggccagtacagcctcgcgatgggccgatatgaatcggctctccgggcgtttcacacctgcggagaacgtatgcgcagctgggatgttgacgtgcctggtctggccctgtggcgtgtcgacgccgccgaggcgctgctcagcctcgaccggaacgagggccagcggctcatcgacgaacaactcacccgtccgatggggcctcgttcccgcgcgttaacgctgcggatcaaggcggcatacctcccgcggacgaagcggatccccctgctccatgaggcggccgagctgctgctcccctgccccgacccgtacgagcaagcgcgggtgctcgccgatctgggcgacacgctcagcgcgctcagacgctatagccgggcgcggggagttctccggcaggctcgtcacctggccgcccagtgcggtgctgtcccgctgctgcgcaggctcgggggcgagcccggccggatcgacgacgccggcctgccgcagcggagcacatcgttgaccgatgcggagcggcgggtggcggcgctggccgcggccggacagaccaaccgggagatcgccaaacagctgttcgtcacggccagcacagtggaacagcacctcacaagcgtcttccgcaaactgggggtcaagggtcgcaagcagctgccgaccgcgctggccgacgtggaacagacctga

SEQ ID NO: 180 - DNA, 2721 bp, Streptomyces violaceusniger
atgtatagcggtacctgccgtgaaggatacgaactcgtcgcacgcgaggacgaactcggcattctacagaggtctctggaacaagcgagcagcggccagggcgtcgtggtcaccgtcaccggcccaatcgcctgcggcaagacagaactgcttgacgcggctgccgcgaaggctgaggccatcattctgcgcgcggtctgcgcgccagaagagcgggctatgccgtacgccatgatcgggcagctcatcgacgacccggcgctcgcgcatcgggcgccggggctggctgatcggatagcccagggcgggcagctgtcgctgagggccgagaaccgactgcgcagggatctcacccgtgccctgctggcgcttgccgtcgaccggcctgtgctgatcggcgtcgacgatgtgcatcacgccgacaccgcctctttgaactgtctgctgcatttggcgcgccgggtccgtccggcccggatatccatgatcttcaccgagttgcgcagcctcacccctactcagtcacggttcaaggcggagctgctcagcctgccgtaccaccacgagatcgcgctgcgtccgttcggaccggagcaatcggcggagctggcccgcgccgccttcggcccgggcctcgccgaggatgtgctcgtggggttgtataaaacgaccaggggcaatctgagtctcagccgtggactgatcagcgatgtgcgggaggccctggccaacggagagagcgccttcgaggcgggccgcgcgttccggctggcgtacctcggctcgctctaccgctgtggcccggtcgcgctgcgggtcgcccgagtggctgccgtgctgggcccgagcgccaccaccacgctggtgcgccgtctaagcgggctcagcgcggagacgatagaccgggcaaccaagatcctcaccgagggcgggctgctgctcgaccagcagttcccgcacccggccgcccgctcggtggtgcttgatgacatgtccgcccaggaacgacgcggcctgcacactctcgccctggaactgctggacgaggcgccggttgaagtgctcgcgcaccaccaggtcggcgccggtctcatacacgggcccaaggctgcggagatgttcgccaaggccggcaaggctctggtcgtacgcaacgagttgggcgacgcggcagaatacctgcaactggctcaccgggcctccgacgatgtctccacccgggccgccctgcgggtcgaggccgtggcgatcgagcgccgccgcaatccgctggcctccagtcggcacatggacgagctgagcgccgccggccgcgccggtctgctttcccccaagcatgcggcgctggccgtcttctggctggccgacggcgggcgatccggcgaggcagccgaggtgctggcgtcggaacgcccgctagcgaccaccgatcagaaccgggcccacttgcgatttgtcgaggtgactctcgcgctgttctctcccggcgccttcggatcggaccggcgcccacctccgctgacgccggacgaactcgccagcctgccgaaggcggcctggcaatgcgcggtcgccgacaacgcggccatgaccgccttgcacggtcatccagaacttgccaccgctcaggcggaaacagttctgcggcaggctgattcggcagccgacgcgatccccgccgcgctgatcgccctgttgtacgcggagaacaccgagtccgctcatatctgggccgacaagctgggcagcacgaatggcggggtatcgaacgaggcggaagcgggctacgccggcccgtgcgccgagatcgccctgcggcgcggcgacctggccacggcgttcgaggctggtagcaccgtcctggacgaccggtcgctgccgtcgctcggcatcaccgccgcattgctgttgagcagcaagacggccgccgctgtccggctgggcgaactcgagcgtgcggagaagctgctcgccgagccgcttccgaacggcgtccaggacagccttttcggtctgcacctgctctcggcatacggccagtacagcctcgcgatgggccgatatgaatcggctctccgggcgtttcacacctgcggagaacgtatgcgcagctgggatgttgacgtgcctggtctggccctgtggcgtgtcgacgccgccgaggcgctgctcagcctcgaccggaacgagggccagcggctcatcgacgaacaactcacccgtccgatggggcctcgttcccgcgcgctgacgctgcggatcaaggcggcatacctcccgcggacgaagcggatccccctgctccatgaggcggccgagctgctgctcccctgccccgacccgtacgagcaagcgcgggtgctcgccgatctgggcgacacgctcagcgcgctcagacgctatagccgggcgcggggagttctccggcaggctcgtcacctggccgcccagtgcggtgctgtcccgctgctgcgcaggctcgggggcgagcccggccggatcgacgacgccggcctgccgcagcggagcacatcgttgaccgatgcggagcggcgggtggcggcgctggccgcggccggacagaccaaccgggagatcgccaaacagctgttcgtcacggccagcacagtggaacagcacctcacaagcgtcttccgcaaactgggggtcaagggtcgcaagcagctgccgaccgcgctggccgacgtggaacagacctga

SEQ ID NO: 181 - DNA, 2745 bp, Streptomyces hygroscopicus
atgcctgccgtggagagctatgaactggacgcccgcgatgacgagctcagaagactggaggaggcggtaggccaggcgggcaacggccggggtgtggtggtcaccatcaccgggccgatcgcctgcggcaagaccgaactgctcgacgcggccgccgcgaagagcgacgccatcacattacgtgcggtctgctccgaggaggaacgggccctcccgtacgccctgatcgggcagctcatcgacaacccggcggtcgcctcccagctgccggatccggtctccatggccctcccgggcgagcacctgtcgccggaggccgagaaccggctgcgcggcgacctcacccgtaccctgctggcgctcgccgccgaacggccggtgctgatcggcatcgacgacatgcaccacgccgacaccgcctctttgaactgcctgctccacctggcccggagggtcggcccggcccggatcgccatggtcctcaccgagctgcgccggctcaccccggcccactcccagttccacgccgagctgctcagcctggggcaccaccgcgagatcgcgctgcgcccgctcggcccgaagcacatcgccgagctggcccgcgccggcctcggtcccgatgtcgacgaggacgtgctcacggggttgtaccgggcgaccggcggcaacctgaacctcggccacggactgatcaaggatgtgcgggaggcctgggcgacgggcgggacgggcatcaacgcgggccgcgcgtaccggctggcgtacctcggttccctctaccgctgcggcccggtcccgttgcgggtcgcacgggtggccgccgtgctgggccagagcgccaacaccaccctggtgcgctggatcagcgggctcaacgcggacgcggtgggcgaggcgaccgagatcctcaccgagggcggcctgctgcacgacctgcggttcccgcatccggcggcccgttcggtcgtactcaacgacctgtccgcccgggaacgccgccgactgcaccggtccgctctggaagtgctggatgacgtacccgttgaagtggtcgcgcaccaccaggccggtgccggtttcatccacggtcccaaggccgccgagatcttcgccaaggccggccaggagctgcatgtgcgcggcgagctggacgccgcgtccgactatctgcaactggcccaccacgcctccgacgacgccgtcacccgggccgcgctgcgggtcgaggccgtggcgatcgagcgccgccgcaacccgctggcctccagccgccacctcgacgagctgaccgtcgccgcccgtgccggtctgctctccctcgagcacgccgcgctgatgatccgctggctggctctcggcgggcggtccggcgaggcggccgaggtgctggccgcgcagcgcccgcgtgcggtcaccgaccaggacagggcccacctgcgggccgccgaggtatcgctggcgctggtcagcccgggcgcgtccggcgtcagcccgggtgcgtccggcccggatcggcggccgcgtccgctcccgccggatgagctcgcgaacctgccgaaggcggcccggctttgtgcgatcgccgacaacgccgtcatatcggccctgcacggtcgtcccgagcttgcctcggccgaggcggagaacgtcctgaagcaggctgactcggcggcggacggcgccaccgccctctccgcgctgacggccttgctgtacgcggagaacaccgacaccgctcagctctgggccgacaagctcgtctccgagaccggggcgtcgaacgaggaggaaggcgcgggctacgcggggccgcgcgccgagaccgcgttgcgccgcggcgacctggccgcggcggtcgaggcgggcagcgccattctggaccaccggcgggggtcgttgctcggcatcaccgccgcgctaccgctgagcagcgcggtagccgccgccatccggctgggcgagaccgagcgggcggagaagtggctcgccgagccgctgccggaggccattcgggacagcctgttcgggctgcacctgctctcggcgcgcggccagtactgcctcgcgacgggccggcacgagtcggcgtacacggcgttccgcacctgcggggaacggatgcggaactggggcgtcgacgtgccgggtctgtccctgtggcgcgtcgacgccgccgaggcgctgctgcacggccgcgaccgggacgagggccgacggctcatcgacgagcagctcacccatgcgatgggaccccgttcccgcgctttgacgctgcgggtgcaggcggcgtacagcccgcaggcgcagcgggtcgacctgctcgaagaggcggccgacctgctgctctcctgcaacgaccagtacgagcgggcgcgggtgctcgccgatctgagcgaggcgttcagcgcgctcaggcaccacagccgggcgcggggactgctccggcaggcccggcacctggccgcccagtgcggcgcgaccccgctgctgcgccggctcggggccaagcccggaggccccggctggctggaggaatccggcctgccgcagcggatcaagtcgctgaccgacgcggagcggcgggtggcgtcgctggccgccggcggccagaccaaccgcgtgatcgccgaccagctcttcgtcacggccagcacggtggagcagcacctcacgaacgtcttccgcaagctgggcgtcaagggccgccagcacctgccggccgaactcgccaacgcggaatag

SEQ ID NO: 182 - DNA, 2745 bp, Streptomyces hygroscopicus
atgcctgccgtggagagctatgaactggacgcccgcgatgacgagctcagaagactggaggaggcggtaggccaggcgggcaacggccggggtgtggtggtcaccatcaccgggccgatcgcctgcggcaagaccgaactgctcgacgcggccgccgcgaagagcgacgccatcacactgcgtgcggtctgctccgaggaggaacgggccctcccgtacgccctgatcgggcagctcatcgacaacccggcggtcgcctcccagctgccggatccggtctccatggccctcccgggcgagcacctgtcgccggaggccgagaaccggctgcgcggcgacctcacccgtaccctgctggcgctcgccgccgaacggccggtgctgatcggcatcgacgacatgcaccacgccgacaccgcctctttgaactgcctgctccacctggcccggagggtcggcccggcccggatcgccatggtcctcaccgagctgcgccggctcaccccggcccactcccagttccacgccgagctgctcagcctggggcaccaccgcgagatcgcgctgcgcccgctcggcccgaagcacatcgccgagctggcccgcgccggcctcggtcccgatgtcgacgaggacgtgctcacggggttgtaccgggcgaccggcggcaacctgaacctcggccacggactgatcaaggatgtgcgggaggcctgggcgacgggcgggacgggcatcaacgcgggccgcgcgtaccggctggcgtacctcggttccctctaccgctgcggcccggtcccgttgcgggtcgcacgggtggccgccgtgctgggccagagcgccaacaccaccctggtgcgctggatcagcgggctcaacgcggacgcggtgggcgaggcgaccgagatcctcaccgagggcggcctgctgcacgacctgcggttcccgcatccggcggcccgttcggtcgtactcaacgacctgtccgcccgggaacgccgccgactgcaccggtccgctctggaagtgctggatgacgtacccgttgaagtggtcgcgcaccaccaggccggtgccggtttcatccacggtcccaaggccgccgagatcttcgccaaggccggccaggagctgcatgtgcgcggcgagctggacgccgcgtccgactatctgcaactggcccaccacgcctccgacgacgccgtcacccgggccgcgctgcgggtcgaggccgtggcgatcgagcgccgccgcaacccgctggcctccagccgccacctcgacgagctgaccgtcgccgcccgtgccggtctgctctccctcgagcacgccgcgctgatgatccgctggctggctctcggcgggcggtccggcgaggcggccgaggtgctggccgcgcagcgcccgcgtgcggtcaccgaccaggacagggcccacctgcgggccgccgaggtatcgctggcgctggtcagcccgggcgcgtccggcgtcagcccgggtgcgtccggcccggatcggcggccgcgtccgctcccgccggatgagctcgcgaacctgccgaaggcggcccggctttgtgcgatcgccgacaacgccgtcatatcggccctgcacggtcgtcccgagcttgcctcggccgaggcggagaacgtcctgaagcaggctgactcggcggcggacggcgccaccgccctctccgcgctgacggccttgctgtacgcggagaacaccgacaccgctcagctctgggccgacaagctcgtctccgagaccggggcgtcgaacgaggaggaaggcgcgggctacgcggggccgcgcgccgagaccgcgttgcgccgcggcgacctggccgcggcggtcgaggcgggcagcgccattctggaccaccggcgggggtcgttgctcggcatcaccgccgcgctaccgctgagcagcgcggtagccgccgccatccggctgggcgagaccgagcgggcggagaagtggctcgccgagccgctgccggaggccattcgggacagcctgttcgggctgcacctgctctcggcgcgcggccagtactgcctcgcgacgggccggcacgagtcggcgtacacggcgttccgcacctgcggggaacggatgcggaactggggcgtcgacgtgccgggtctgtccctgtggcgcgtcgacgccgccgaggcgctgctgcacggccgcgaccgggacgagggccgacggctcatcgacgagcagctcacccatgcgatgggaccccgttcccgcgctttgacgctgcgggtgcaggcggcgtacagcccgcaggcgcagcgggtcgacctgctcgaagaggcggccgacctgctgctctcctgcaacgaccagtacgagcgggcgcgggtgctcgccgatctgagcgaggcgttcagcgcgctcaggcaccacagccgggcgcggggactgctccggcaggcccggcacctggccgcccagtgcggcgcgaccccgctgctgcgccggctcggggccaagcccggaggccccggctggctggaggaatccggcctgccgcagcggatcaagtcgctgaccgacgcggagcggcgggtggcgtcgctggccgccggcggccagaccaaccgcgtgatcgccgaccagctcttcgtcacggccagcacggtggagcagcacctcacgaacgtcttccgcaagctgggcgtcaagggccgccagcacctgccggccgaactcgccaacgcggaatag

SEQ ID NO: 183 - DNA, 2619 bp, Actinoplanes sp. N01-109
gtgaagcgcaacgatctggttgcccgcgatggcgagctcaggtggatgcaagagattctcagtcaggcgagcgagggccggggggccgtggtcaccatcacgggggcgatcgcctgtggcaagacggtgctgctggacgccgcggcagccagtcaagacgtgatccaactgcgtgcggtctgctcggcggaggagcaggagctgccgtacgcgatggtcggacaactactcgacaatccggtgctcgccgcgcgagtgccggccctgggcaacctggctgcggcgggcgagcggctgctgccgggcaccgagaacaggatccggcgggagctcacccgcaccctgctggctctcgccgacgaacgaccggtgctgatcggcgtcgacgacatgcaccatgcggaccccgcctcgctggactgcctgctgcacctggcccggcgggtcggcccggcccgcatcgcgatcgttctgaccgagttgcgccggctcaccccggctcactcgcgcttccagtccgagctgctcagcctgcggtaccaccacgagatcgggttgcagccgctcaccgcggagcacaccgccgacctggcccgcgtcggcctcggtgccgaggtcgacgacgacgtgctcaccgagctctacgaggcgaccggcggcaacccgagtctgtgctgcggcctgatcagggacgtgcggcaggactgggaggccggggtcaccggtatccacgtcggccgggcgtaccggctggcctatctcagttcgctctaccgctgcggcccggcggcgctgcggaccgcccgcgcggccgcggtgctgggcgacagcgccgacgcctgcctgatccgccgggtcagcggcctcggtacggaggccgtgggccaggcgatccagcagctcaccgagggcggcctgctgcgtgaccagcagttcccgcacccggcggcccgctcggtcgtgctcgacgacatgtccgcgcaggaacgccacgcgatgtatcgcagcgcccgggaggcagccgccgaaggtcaggccgaccccggcaccccgggcgagccgcgggcggctacggcgtacgccgggtgtggtgagcaagccggtgactacccggagccggccggccgggcctgcgtggacggtgccggtccggccgagtactgcggcgacccgcacggcgccgacgacgacccggacgagctggtcgccgcgctgggcgggctgctgccgagccggctcgtggcgatgaagatccggcgcctggcggtggccgggcgccccggggcggctgccgagctgctgacctcgcagcggttgcacgcggtgaccagcgaggaccgggccagcctgcgggccgccgaggtggcgctcgccacgctgtggccgggtgcgaccggcccggaccggcatccgctcacggagcaggaggcggcgagcctgccggagggtccgcgcctgctcgctgccgccgacgatgccgtcggggccgccctgcgcggtcgcgccgagtacgccgcggccgaggcggagaacgtcctgcggcacgccgatccggcagccggtggtgacgcctacgccgccatgatcgccctgctgtacacggagcaccccgagaacgtgctgttctgggccgacaagctcgacgcgggccgccccgacgaggagaccagttatcccgggctgcgggccgagaccgcggtgcggctcggtgacctggaaacggcgatggagctgggccgcacggtgctggaccagcggcggctgccgtccctgggtgtcgccgcgggcctgctcctgggcggcgcggtgacggccgccatccggctcggcgacctcgaccgggcggagaagtggctcgccgagccgatccccgacgccatccgtaccagcctctacggcctgcacgtgctggccgcgcggggccggctcgacctggccgcgggccgctacgaggcggcgtacacggcgttccggctgtgtggcgagcggatggcaggctgggatgccgatgtctccgggctggcgctgtggcgcgtcgacgccgccgaggccctgctgtccgcgggcatccgcccggacgagggccgcaagctcatcgacgaccagctcacccgtgagatgggggcccgctcccgggcgctgacgctgcgggcgcaagcggcgtacagcctgccggtgcaccgggtgggcctgctcgacgaggcggccggcctgctgctcgcctgccatgacgggtacgagcgggcgcgggtgctcgcggacctgggggagaccctgcgcacgctgcggcacaccgacgcggcccagcgggtgctccggcaggccgagcaggcggccgcgcggtgcgggtcggtcccgctgctgcggcggctcggggccgaacccgtacgcatcggcacccggcgtggtgaacccggcctgccgcagcggatcaggctgctgaccgatgccgagcggcgggttgccgcgatggccgccgccgggcagaccaaccgggagatcgccggtcggctcttcgtcacggccagcacggtggagcagcacctgaccagcgtcttccgcaagctgggcgtcaagggccgccggttcctgccgaccgagctcgcccaagccgtctga

SEQ ID NO: 184 - DNA, 2628 bp, Actinoplanes sp. N01-109
atgcctgccgtgaagcgcaacgatctggttgcccgcgatggcgagctcaggtggatgcaagagattctcagtcaggcgagcgagggccggggggccgtggtcaccatcacgggggcgatcgcctgtggcaagacggtgctgctggacgccgcggcagccagtcaagacgtgatccaactgcgtgcggtctgctcggcggaggagcaggagctgccgtacgcgatggtcggacaactactcgacaatccggtgctcgccgcgcgagtgccggccctgggcaacctggctgcggcgggcgagcggctgctgccgggcaccgagaacaggatccggcgggagctcacccgcaccctgctggctctcgccgacgaacgaccggtgctgatcggcgtcgacgacatgcaccatgcggaccccgcctcgctggactgcctgctgcacctggcccggcgggtcggcccggcccgcatcgcgatcgttctgaccgagttgcgccggctcaccccggctcactcgcgcttccagtccgagctgctcagcctgcggtaccaccacgagatcgggttgcagccgctcaccgcggagcacaccgccgacctggcccgcgtcggcctcggtgccgaggtcgacgacgacgtgctcaccgagctctacgaggcgaccggcggcaacccgagtctgtgctgcggcctgatcagggacgtgcggcaggactgggaggccggggtcaccggtatccacgtcggccgggcgtaccggctggcctatctcagttcgctctaccgctgcggcccggcggcgctgcggaccgcccgcgcggccgcggtgctgggcgacagcgccgacgcctgcctgatccgccgggtcagcggcctcggtacggaggccgtgggccaggcgatccagcagctcaccgagggcggcctgctgcgtgaccagcagttcccgcacccggcggcccgctcggtcgtgctcgacgacatgtccgcgcaggaacgccacgcgatgtatcgcagcgcccgggaggcagccgccgaaggtcaggccgaccccggcaccccgggcgagccgcgggcggctacggcgtacgccgggtgtggtgagcaagccggtgactacccggagccggccggccgggcctgcgtggacggtgccggtccggccgagtactgcggcgacccgcacggcgccgacgacgacccggacgagctggtcgccgcgctgggcgggctgctgccgagccggctcgtggcgatgaagatccggcgcctggcggtggccgggcgccccggggcggctgccgagctgctgacctcgcagcggttgcacgcggtgaccagcgaggaccgggccagcctgcgggccgccgaggtggcgctcgccacgctgtggccgggtgcgaccggcccggaccggcatccgctcacggagcaggaggcggcgagcctgccggagggtccgcgcctgctcgctgccgccgacgatgccgtcggggccgccctgcgcggtcgcgccgagtacgccgcggccgaggcggagaacgtcctgcggcacgccgatccggcagccggtggtgacgcctacgccgccatgatcgccctgctgtacacggagcaccccgagaacgtgctgttctgggccgacaagctcgacgcgggccgccccgacgaggagaccagttatcccgggctgcgggccgagaccgcggtgcggctcggtgacctggaaacggcgatggagctgggccgcacggtgctggaccagcggcggctgccgtccctgggtgtcgccgcgggcctgctcctgggcggcgcggtgacggccgccatccggctcggcgacctcgaccgggcggagaagtggctcgccgagccgatccccgacgccatccgtaccagcctctacggcctgcacgtgctggccgcgcggggccggctcgacctggccgcgggccgctacgaggcggcgtacacggcgttccggctgtgtggcgagcggatggcaggctgggatgccgatgtctccgggctggcgctgtggcgcgtcgacgccgccgaggccctgctgtccgcgggcatccgcccggacgagggccgcaagctcatcgacgaccagctcacccgtgagatgggggcccgctcccgggcgctgacgctgcgggcgcaagcggcgtacagcctgccggtgcaccgggtgggcctgctcgacgaggcggccggcctgctgctcgcctgccatgacgggtacgagcgggcgcgggtgctcgcggacctgggggagaccctgcgcacgctgcggcacaccgacgcggcccagcgggtgctccggcaggccgagcaggcggccgcgcggtgcgggtcggtcccgctgctgcggcggctcggggccgaacccgtacgcatcggcacccggcgtggtgaacccggcctgccgcagcggatcaggctgctgaccgatgccgagcggcgggttgccgcgatggccgccgccgggcagaccaaccgggagatcgccggtcggctcttcgtcacggccagcacggtggagcagcacctgaccagcgtcttccgcaagctgggcgtcaagggccgccggttcctgccgaccgagctcgcccaagccgtctga

SEQ ID NO: 185 - DNA, 2616 bp, Streptomyces malaysiensis
gtggtcaccgtcaccggcccaatcgcctgcggcaagacagaactgcttgacgcggctgccgcgaaggctgaggccatcattctgcgcgcggtctgcgcgccagaagagcgggctatgccgtacgccatgatcgggcagctcatcgacgacccggcgctcgcgcatcgggcgccggggctggctgatcggatagcccagggcgggcagctgtcgctgagggccgagaaccgactgcgcagggatctcacccgtgccctgctggcgcttgccgtggaccggcctgtgctgatcggcgtcgacgatgtgcatcacgccgacaccgcctctttgaactgtctgctgcatttggcccgccgggtccgtccggcccggatatccatgatcttcaccgagttgcgcagcctcacccctactcagtcacggttcaaggcggagctgctcagcctgccataccaccacgagatcgcgctgcgtccattcggaccggagcaatcggcggagctggctcgcgccgccttcggcccgggcctcgccgaggatgtgctcgcggggttgtataaaacgaccaggggcaatctgagtctcagccgtggactgatcagcgatgtgcgggaggccctggccaacggagagagcgctttcgaggcgggccgcgcgttccggctggcgtacctcagctcgctctaccgctgtggcccggtcgcgctgcgggtcgcccgagtggctgccgtgctgggcccaagcgccaccaccacgctggtgcgccggctaagcgggctcagcgcggagacgatagaccgggcaaccaagatcctcactgagggcgggctgctgctcgaccagcagttcccgcacccggccgcccgctcggtggtgctcgatgacatgtccgcccaggaacgacgcagcctgcacactctcgccctggaactgctggacgaggcgccggttgaagtgctcgcgcaccaccaggtcggcgccggtctcatacacgggcccaaggctgcggagatgttcgccaaggccggcaaggctctggtcgtacgcaacgagttgggcgacgcggccgaatacctgcaactggctcaccgggcctccgacgatgtctccacccgggccgccttacgggtcgaggccgtggccatcgagcgccgccgcaatccgctggcctccagtcggcacatggacgaactgagcgccgccggccgcgccggtctgctttcccccaagcatgcggcgctggccgtcttctggctagccgacggcgggcgatccggcgaggcagccgaagtgctggcgtcggaacgcccgctcgcgaccaccgatcagaaccgggcccacctgcgatttgtcgaggtgactctcgcgctgttctctcccggcgccttcggatcggaccggcgcccacctccgctgacgccggacgaactcgccagcctgccgaaggcggcctggcaatgcgcggtcgccgacaacgcggccatgaccgccttgcacggccatccagaacttgccaccgctcaggcggaaacagttctgcggcaggctgattcggcagccgacgcgatccccgccgcgctgatcgccctgttgtacgcggagaacaccgagtccgctcatatctgggccgacaagctgggcagcacgaatgccggggtatcgaacgaggcggaagcgggctacgccggcccgtgcgccgagatcgccctgcggcgcggcgacctggccacggcgttcgaggctggtagcgccgtcctggacgaccggtcgctgccgtcgctcggcatcaccgccgcattgctgttgagcagcaagacggccgccgctgtccggctgggcgaactcgagcgtgcggagaagctgctcgccgagccgcttccgaacggcgtccaggacagccttttcggtctgcacctgctctcggcgtacggccagtacagcctcgcgatgggccgatatgaatcagctcaccgggcgtttcgcacctgcggagaacgtatgcgcagctgggatgttgacgtgcctggtctggccctgtggcgtgtcgacgccgccgaggcgctgctcagcctcgaccggaacgagggccagcggctcatcgacgaacaactcacccgtccgatggggcctcgttcccacgcgttaacgctgcggatcaaggcggcatacctcccgcggacgaagcggatccccctgctccatgaggcggccgagctgctgctcccctgccccgacccgtacgagcaagcgcgggtgctcgccgatctgggcgacacgctcagcgcgctcagacgctatagccgggcgcggggagttctccggcaggctcgtcacctggccacccagtgcggtgctgtcccgctgctgcgcaggctcgggggcgagcccggccggatcgacgacgccggcctgccgcagcggagcacatcgttgaccgatgcggagcggcgggtggcggcgctggccgcggccggacagaccaaccgggagatcgccgaacagctgttcgtcacggccagcacagtggaacagcacctcacaagcgtcttccgcaagctgggcgtcaagggccgcaagcagctgccgaccgcgctggccgacgtggaacagacctga

SEQ ID NO: 186 - DNA, 2721 bp, Streptomyces malaysiensis
atgtatagcggtacctgccgtgaaggatacgaactcgtcgcacgcgaggacgaactcggtattctacagaggtctctggaacaagcgagcagcggccagggcgtcgtggtcaccgtcaccggcccaatcgcctgcggcaagacagaactgcttgacgcggctgccgcgaaggctgaggccatcattctgcgcgcggtctgcgcgccagaagagcgggctatgccgtacgccatgatcgggcagctcatcgacgacccggcgctcgcgcatcgggcgccggggctggctgatcggatagcccagggcgggcagctgtcgctgagggccgagaaccgactgcgcagggatctcacccgtgccctgctggcgcttgccgtggaccggcctgtgctgatcggcgtcgacgatgtgcatcacgccgacaccgcctctttgaactgtctgctgcatttggcccgccgggtccgtccggcccggatatccatgatcttcaccgagttgcgcagcctcacccctactcagtcacggttcaaggcggagctgctcagcctgccataccaccacgagatcgcgctgcgtccattcggaccggagcaatcggcggagctggctcgcgccgccttcggcccgggcctcgccgaggatgtgctcgcggggttgtataaaacgaccaggggcaatctgagtctcagccgtggactgatcagcgatgtgcgggaggccctggccaacggagagagcgctttcgaggcgggccgcgcgttccggctggcgtacctcagctcgctctaccgctgtggcccggtcgcgctgcgggtcgcccgagtggctgccgtgctgggcccaagcgccaccaccacgctggtgcgccggctaagcgggctcagcgcggagacgatagaccgggcaaccaagatcctcactgagggcgggctgctgctcgaccagcagttcccgcacccggccgcccgctcggtggtgctcgatgacatgtccgcccaggaacgacgcagcctgcacactctcgccctggaactgctggacgaggcgccggttgaagtgctcgcgcaccaccaggtcggcgccggtctcatacacgggcccaaggctgcggagatgttcgccaaggccggcaaggctctggtcgtacgcaacgagttgggcgacgcggccgaatacctgcaactggctcaccgggcctccgacgatgtctccacccgggccgccctgcgggtcgaggccgtggccatcgagcgccgccgcaatccgctggcctccagtcggcacatggacgaactgagcgccgccggccgcgccggtctgctttcccccaagcatgcggcgctggccgtcttctggctagccgacggcgggcgatccggcgaggcagccgaagtgctggcgtcggaacgcccgctcgcgaccaccgatcagaaccgggcccacctgcgatttgtcgaggtgactctcgcgctgttctctcccggcgccttcggatcggaccggcgcccacctccgctgacgccggacgaactcgccagcctgccgaaggcggcctggcaatgcgcggtcgccgacaacgcggccatgaccgccttgcacggccatccagaacttgccaccgctcaggcggaaacagttctgcggcaggctgattcggcagccgacgcgatccccgccgcgctgatcgccctgttgtacgcggagaacaccgagtccgctcatatctgggccgacaagctgggcagcacgaatgccggggtatcgaacgaggcggaagcgggctacgccggcccgtgcgccgagatcgccctgcggcgcggcgacctggccacggcgttcgaggctggtagcgccgtcctggacgaccggtcgctgccgtcgctcggcatcaccgccgcattgctgttgagcagcaagacggccgccgctgtccggctgggcgaactcgagcgtgcggagaagctgctcgccgagccgcttccgaacggcgtccaggacagccttttcggtctgcacctgctctcggcgtacggccagtacagcctcgcgatgggccgatatgaatcagctcaccgggcgtttcgcacctgcggagaacgtatgcgcagctgggatgttgacgtgcctggtctggccctgtggcgtgtcgacgccgccgaggcgctgctcagcctcgaccggaacgagggccagcggctcatcgacgaacaactcacccgtccgatggggcctcgttcccacgcgctgacgctgcggatcaaggcggcatacctcccgcggacgaagcggatccccctgctccatgaggcggccgagctgctgctcccctgccccgacccgtacgagcaagcgcgggtgctcgccgatctgggcgacacgctcagcgcgctcagacgctatagccgggcgcggggagttctccggcaggctcgtcacctggccacccagtgcggtgctgtcccgctgctgcgcaggctcgggggcgagcccggccggatcgacgacgccggcctgccgcagcggagcacatcgttgaccgatgcggagcggcgggtggcggcgctggccgcggccggacagaccaaccgggagatcgccgaacagctgttcgtcacggccagcacagtggaacagcacctcacaagcgtcttccgcaagctgggcgtcaagggccgcaagcagctgccgaccgcgctggccgacgtggaacagacctga

SEQ ID NO: 187 - DNA, 2715 bp, Streptomyces violaceusniger
gtgtatagcggtacctgccgtgaaggatacgaactcgtcgcccgcgaggacgaactcggcattctgcagaggtctctggaagaagcaggcagcggccagggcgccgtggtcaccgtcaccggcccgatcgcctgcggcaagacagaactgcttgacgcggctgccgcgaaggctgacgccatcattctgcgcgcggtctgcgcgcccgaagagcgcgctatgccgtacgccatgatcgggcagctcatcgacgacccggcgctcgcgcatcgggcgccggagctggctgatcggatagcccagggcgggcatctgtcgctgagggccgagaaccgactgcgcagggatctcacccgtgccctgctggcgcttgccgtcgaccggcctgtgctgatcggcgtcgacgatgtgcatcacgccgacaccgcctctttgaactgtctgctgcatttagcccgccgggtccgtccggcccggatatccatgatcttcaccgagttgcgcagcctcacccctactcagtcacgattcaaggcggagctgctcagcctgccgtaccaccacgagatcgcgctgcgtccactcggaccggagcaatcggcggagctggcccacgccgccttcggcccgggcctcgccgaggatgtgctcgcggggttgtatgggatgaccaggggcaacctgagtctcagccgtggactgatcagcgatgtgcgggaggcccaggccaacggagagagcgctttcgaggtgggccgcgcgttccggctggcgtacctcagctcgctctaccgctgtggcccgatcgcgctgcgggtcgcccgagtggctgccgtgctgggcccaagcgccaccaccacgctggtgcgccgtctaagcgggctcagcgcggagacgatagaccgggcaaccaagatcctcactgagggcgggctgctgctcgaccaccagttcccgcacccggccgcccgctcggtggtgctcgatgacatgtccgcccaggaacgacgcagcctgcacactctcgccctggaactgctggacgaggcgccggttgaagtgctcgcgcaccaccaggtcggcgccggtctcatacacgggcccaaggctgcggagatattcgccagggctggccaggctctggttgtacgcaacgagttgggcgacgcggccgaatacctgcaactggctcaccgagcctccgacgatgtctccacccgggccgccttacgggtcgaggccgtggcaatcgagcgccgccgcaatccgctggcctccagtcgtcacatggacgagctgagcgccgccggccgcgccggtctgctttcccccaagcatgcagcgctggctgtcttctggctggccgacggcgggcgatccggcgaggcagccgaggtgctggcgtcggaacacccgctcgcgaccaccgatcagaaccgagcacacctgcgatttgccgaggtgactctcgcgctgttctgtcccggcgccttcgggtcggaccggcgcccacctccgctggcgccggacgagctcgccagcttgccgaaggcggcctggcaatgcgcggtcgccgacaacgcggtcatgacagcgttgcatgctcatccagaacttgccaccgctcaggcggaaacagttctgcggcaggctgattcggcagccgacgcaatccccgccgcactgatcgccctgttgtacgcagagaacaccgagtccgctcagatctgggccgacaagctgggcagcaccaatgccggggtatcgaacgaggcggaagcgggctacgccggcccgtgcgccgagatcgccctgcggcgcggcgacctggccacggcgttcgaggctggtggcaccgtcctggacgaccggccgctgccgtcgctcggcatcaccgccgcattgctgttgagcagcaagacggcagccgctgtccgcctgggcgaactcgagcgtgcggagaagctgctcgctgagccgcttccgaacggtgtccaggacagccttttcggtctgcacctgctctcggcgcacggccagtacagcctcgcgatgggccgatatgaatcggctcaccgggcgtttcacacctgcggagaacgtatgcgcagctggggtgttgacgtgcctggtctagccctgtggcgtgtcgacgccgccgaggcactgctcagcctcgaccggaacgagggccagcggctcatcgacgaacaactcgcccgtccgatgggacctcgttcccgcgcattaacgctgcggatcaaggcggcatacctcccgcggacgaagcggatccccctgctccatgaggcagctgagctgctgctctcctgccccgacccgtacgagcaagcgcgggtgctcgccgatctgggcgacacgctcagcgcgctcagacgctatagccgggcgcggggagttctccggcaggctcgtcacctggccacccagtgcggtgctgtcccgctgctgcgccgactcgggggcgagcccggccggatcgacgacgccggcctgccgcagcggagcacatcgttgaccgatgcggagcggcgggtgtcggccctggccgcggccggacagaccaaccgggagatcgccaaacagctattcgtcacggccagcaccgtggaacagcacctcacaagcgtcttccgcaagctgggcgttaagggccgcaggcagctaccgaccgcgctggccgacgtggaatag

SEQ ID NO: 188 - DNA, 2715 bp, Streptomyces violaceusniger
atgtatagcggtacctgccgtgaaggatacgaactcgtcgcccgcgaggacgaactcggcattctgcagaggtctctggaagaagcaggcagcggccagggcgccgtggtcaccgtcaccggcccgatcgcctgcggcaagacagaactgcttgacgcggctgccgcgaaggctgacgccatcattctgcgcgcggtctgcgcgcccgaagagcgcgctatgccgtacgccatgatcgggcagctcatcgacgacccggcgctcgcgcatcgggcgccggagctggctgatcggatagcccagggcgggcatctgtcgctgagggccgagaaccgactgcgcagggatctcacccgtgccctgctggcgcttgccgtcgaccggcctgtgctgatcggcgtcgacgatgtgcatcacgccgacaccgcctctttgaactgtctgctgcatctggcccgccgggtccgtccggcccggatatccatgatcttcaccgagttgcgcagcctcacccctactcagtcacgattcaaggcggagctgctcagcctgccgtaccaccacgagatcgcgctgcgtccactcggaccggagcaatcggcggagctggcccacgccgccttcggcccgggcctcgccgaggatgtgctcgcggggttgtatgggatgaccaggggcaacctgagtctcagccgtggactgatcagcgatgtgcgggaggcccaggccaacggagagagcgctttcgaggtgggccgcgcgttccggctggcgtacctcagctcgctctaccgctgtggcccgatcgcgctgcgggtcgcccgagtggctgccgtgctgggcccaagcgccaccaccacgctggtgcgccgtctaagcgggctcagcgcggagacgatagaccgggcaaccaagatcctcactgagggcgggctgctgctcgaccaccagttcccgcacccggccgcccgctcggtggtgctcgatgacatgtccgcccaggaacgacgcagcctgcacactctcgccctggaactgctggacgaggcgccggttgaagtgctcgcgcaccaccaggtcggcgccggtctcatacacgggcccaaggctgcggagatattcgccagggctggccaggctctggttgtacgcaacgagttgggcgacgcggccgaatacctgcaactggctcaccgagcctccgacgatgtctccacccgggccgccctgcgggtcgaggccgtggcaatcgagcgccgccgcaatccgctggcctccagtcgtcacatggacgagctgagcgccgccggccgcgccggtctgctttcccccaagcatgcagcgctggctgtcttctggctggccgacggcgggcgatccggcgaggcagccgaggtgctggcgtcggaacacccgctcgcgaccaccgatcagaaccgagcacacctgcgatttgccgaggtgactctcgcgctgttctgtcccggcgccttcgggtcggaccggcgcccacctccgctggcgccggacgagctcgccagcttgccgaaggcggcctggcaatgcgcggtcgccgacaacgcggtcatgacagcgttgcatgctcatccagaacttgccaccgctcaggcggaaacagttctgcggcaggctgattcggcagccgacgcaatccccgccgcactgatcgccctgttgtacgcagagaacaccgagtccgctcagatctgggccgacaagctgggcagcaccaatgccggggtatcgaacgaggcggaagcgggctacgccggcccgtgcgccgagatcgccctgcggcgcggcgacctggccacggcgttcgaggctggtggcaccgtcctggacgaccggccgctgccgtcgctcggcatcaccgccgcattgctgttgagcagcaagacggcagccgctgtccgcctgggcgaactcgagcgtgcggagaagctgctcgctgagccgcttccgaacggtgtccaggacagccttttcggtctgcacctgctctcggcgcacggccagtacagcctcgcgatgggccgatatgaatcggctcaccgggcgtttcacacctgcggagaacgtatgcgcagctggggtgttgacgtgcctggtctagccctgtggcgtgtcgacgccgccgaggcactgctcagcctcgaccggaacgagggccagcggctcatcgacgaacaactcgcccgtccgatgggacctcgttcccgcgcactgacgctgcggatcaaggcggcatacctcccgcggacgaagcggatccccctgctccatgaggcagctgagctgctgctctcctgccccgacccgtacgagcaagcgcgggtgctcgccgatctgggcgacacgctcagcgcgctcagacgctatagccgggcgcggggagttctccggcaggctcgtcacctggccacccagtgcggtgctgtcccgctgctgcgccgactcgggggcgagcccggccggatcgacgacgccggcctgccgcagcggagcacatcgttgaccgatgcggagcggcgggtgtcggccctggccgcggccggacagaccaaccgggagatcgccaaacagctattcgtcacggccagcaccgtggaacagcacctcacaagcgtcttccgcaagctgggcgttaagggccgcaggcagctaccgaccgcgctggccgacgtggaatag

SEQ ID NO: 189 - DNA, 2721 bp, Streptomyces Sp. NRRL F-4729
gtgtatagcggtacctgccgtgaaggatacgaactcgtcgcacgcgaggacgaactcggcattctacagaggtctctggaacaagcgagcagcggccagggcgtcgtggtcaccgtcaccggcccaatcgcctgcggcaagacagaactgcttgacgcggctgccgcgaaggctgaggccatcattctgcgcgcggtctgcgcgcccgaagagcgggctatgccgtacgccatgatcgggcagctcatcgacgacccggcgctcgcgcatcgggcgccggggctggctgatcggatagcccagggcgggcagctgtcgctgagggccgagaaccgactgcgcagggatctcacccgtgccctgctggcgcttgccgtgcaccggcctgtgctgatcggcgtcgatgatgtgcatcacgccgacaccgcctctttgaactgtctgctgcatttggcgcgccgggtccgtccggcccggatatccatgatcttcaccgagttgcgcagcctcacccctactcagtcacgattcaaggcggagctgctcagcctgccgtaccaccacgagatcgcgctgcgtccattcggaccggagcaatcggcggagctggctcgcgccgccttcggcccgggcctcgccgaggatgtgctcgcggggttgtataaaacgaccaggggcaatctgagtctcagccgtggactgatcagcgatgtgcgggaggccctggccaacggagagagcgctttcgaggcgggccgcgcgttccggctggcgtacctcagctcgctctaccgctgtggcccggtcgcgctgcgggtcgcccgagtggctgccgtgctgggcccaagcgccaccaccacgctggtgcgccggctaagcgggctcagcgcggagacgatagaccgggcaaccaagatcctcaccgagggcgggctgctgctcgaccagcagtttccgcacccggccgcccgctcggtggtgctcgatgacatgtccgcccaggaacgacgcggcctgcacactctcgccctggaactgctggacgaggcgccggttgaagtgctcgcgcaccaccaggtcggcgccggtctcatacacgggcccaaggctgcggagatgttcgccaaggccggcaaggctctggtcgtacgcaacgagttgggcgacgcggccgaatacctgcaactggctcaccgggcctccgacgatgtctccacccgggccgccttacgggtcgaggccgtggcgatcgagcgccgccgcaatccgctggcctccagtcggcacatggacgagctgagcgccgccggccgcgccggtctgctttcccccaagcatgcggcgctggccgtcttctggctggccgacggcgggcgatccggcgaggcagcccaggtgctggcgtcggaacgcccgctcgcgaccaccgatcagaaccgggcccacctgcgatttgtcgaggtgactctcgcgctgttctctcccggcgccttcggatcggaccggcgcccacctccgctgacgccggacgaactcgccagcctgccgaaggcggcctggcaatgcgcggtcgccgacaacgcggccatgaccgccttgcacggccatccagaacttgccaccgctcaggcggaaacagttctgcggcaggctgattcggcagccgacgcgatccccgccgcgctgatcgccctgttgtacgcggagaacaccgagtccgctcatatctgggccgacaagctgggcagcatgaatgccggggtatcgaacgaggcggaagcgggctacgccggcccgtgcgccgagatcgccctgcggcgcggcgacctggccacggcgttcgaggctggtagcaccgtcctggacgaccggtcactgccgtcgctcggcatcaccgccgcattgctgttgagcagcaagacggccgccgctgtccggctgggcgaactcgagcgtgcggagaagctgctcgccgagccgcttccgaacggcgtccaggacagccttttcggtctgcacctgctctcggcgtacggccagtacagcctcgcgatgggccgatatgaatcggctcaccgggcgtttcgcacctgcggagaacgtatgcgcagctgggatgttgacgtgcctggtctggccctgtggcgtgtcgacgccgccgaggcgctgctcagcctcgaccggaacgagggccagcggctcatcgacgaacaactcacccgtccgatgggacctcgttcccgcgcgttaacgctgcggatcaaggcggcatacctcccgcggacgaagcggatccccctgctccatgaggcggccgagctgctgctcccctgccccgacccgtacgagcaagcgcgggtgctcgccgatctgggcgacacgctcagcgcgctcagacgctatagccgggcgcggggagttctccggcaggctcgtcacctggccacccagtgcggtgctgtcccgctgctgcgccgactcgggggcgagcccggccggatcgacgacgccggcctgccgcagcggagcacatcgttgaccgatgcggagcggcgggtggcggcgctggccgcggccggacagaccaaccgggagatcgccgaacagctgttcgtcacggccagcacagtggaacagcacctcacaagcgtcttccgcaagctgggcgtcaagggccgcaagcagctgccgaccgcgctggccgacgtggaacagacctga

SEQ ID NO: 190 - DNA, 2721 bp, Streptomyces Sp. NRRL F-4729
atgtatagcggtacctgccgtgaaggatacgaactcgtcgcacgcgaggacgaactcggcattctacagaggtctctggaacaagcgagcagcggccagggcgtcgtggtcaccgtcaccggcccaatcgcctgcggcaagacagaactgcttgacgcggctgccgcgaaggctgaggccatcattctgcgcgcggtctgcgcgcccgaagagcgggctatgccgtacgccatgatcgggcagctcatcgacgacccggcgctcgcgcatcgggcgccggggctggctgatcggatagcccagggcgggcagctgtcgctgagggccgagaaccgactgcgcagggatctcacccgtgccctgctggcgcttgccgtgcaccggcctgtgctgatcggcgtcgatgatgtgcatcacgccgacaccgcctctttgaactgtctgctgcatttggcgcgccgggtccgtccggcccggatatccatgatcttcaccgagttgcgcagcctcacccctactcagtcacgattcaaggcggagctgctcagcctgccgtaccaccacgagatcgcgctgcgtccattcggaccggagcaatcggcggagctggctcgcgccgccttcggcccgggcctcgccgaggatgtgctcgcggggttgtataaaacgaccaggggcaatctgagtctcagccgtggactgatcagcgatgtgcgggaggccctggccaacggagagagcgctttcgaggcgggccgcgcgttccggctggcgtacctcagctcgctctaccgctgtggcccggtcgcgctgcgggtcgcccgagtggctgccgtgctgggcccaagcgccaccaccacgctggtgcgccggctaagcgggctcagcgcggagacgatagaccgggcaaccaagatcctcaccgagggcgggctgctgctcgaccagcagtttccgcacccggccgcccgctcggtggtgctcgatgacatgtccgcccaggaacgacgcggcctgcacactctcgccctggaactgctggacgaggcgccggttgaagtgctcgcgcaccaccaggtcggcgccggtctcatacacgggcccaaggctgcggagatgttcgccaaggccggcaaggctctggtcgtacgcaacgagttgggcgacgcggccgaatacctgcaactggctcaccgggcctccgacgatgtctccacccgggccgccctgcgggtcgaggccgtggcgatcgagcgccgccgcaatccgctggcctccagtcggcacatggacgagctgagcgccgccggccgcgccggtctgctttcccccaagcatgcggcgctggccgtcttctggctggccgacggcgggcgatccggcgaggcagcccaggtgctggcgtcggaacgcccgctcgcgaccaccgatcagaaccgggcccacctgcgatttgtcgaggtgactctcgcgctgttctctcccggcgccttcggatcggaccggcgcccacctccgctgacgccggacgaactcgccagcctgccgaaggcggcctggcaatgcgcggtcgccgacaacgcggccatgaccgccttgcacggccatccagaacttgccaccgctcaggcggaaacagttctgcggcaggctgattcggcagccgacgcgatccccgccgcgctgatcgccctgttgtacgcggagaacaccgagtccgctcatatctgggccgacaagctgggcagcatgaatgccggggtatcgaacgaggcggaagcgggctacgccggcccgtgcgccgagatcgccctgcggcgcggcgacctggccacggcgttcgaggctggtagcaccgtcctggacgaccggtcactgccgtcgctcggcatcaccgccgcattgctgttgagcagcaagacggccgccgctgtccggctgggcgaactcgagcgtgcggagaagctgctcgccgagccgcttccgaacggcgtccaggacagccttttcggtctgcacctgctctcggcgtacggccagtacagcctcgcgatgggccgatatgaatcggctcaccgggcgtttcgcacctgcggagaacgtatgcgcagctgggatgttgacgtgcctggtctggccctgtggcgtgtcgacgccgccgaggcgctgctcagcctcgaccggaacgagggccagcggctcatcgacgaacaactcacccgtccgatgggacctcgttcccgcgcgctgacgctgcggatcaaggcggcatacctcccgcggacgaagcggatccccctgctccatgaggcggccgagctgctgctcccctgccccgacccgtacgagcaagcgcgggtgctcgccgatctgggcgacacgctcagcgcgctcagacgctatagccgggcgcggggagttctccggcaggctcgtcacctggccacccagtgcggtgctgtcccgctgctgcgccgactcgggggcgagcccggccggatcgacgacgccggcctgccgcagcggagcacatcgttgaccgatgcggagcggcgggtggcggcgctggccgcggccggacagaccaaccgggagatcgccgaacagctgttcgtcacggccagcacagtggaacagcacctcacaagcgtcttccgcaagctgggcgtcaagggccgcaagcagctgccgaccgcgctggccgacgtggaacagacctga

SEQ ID NO: 191 - DNA, 2715 bp, Streptomyces filamentosus
gtgcgagctattaatgcgtccgacaccggtcctgaactggtcgcccgcgaagacgaactgggacgtgtacgaagtgccctgaaccgagcgaacggcggccaaggtgtcctgatctccattaccggtccgatcgcctgcggcaagaccgaactgcttgaggctgccgcctcggaagttgacgccatcactctgcgcgcggtctgtgccgccgaggaacgggcgataccttatgccctgatcgggcagcttatcgacaaccccgcgctcggcattccggttccggatccggccggcctgaccgcccagggcggacgactgtcatcgagcgccgagaaccgactgcgtcgcgacctcacccgtgccctgctgacgctcgccaccgaccggctggtgctgatctgtgtcgatgacgtgcagcacgccgacaacgcctcgttgagctgccttctgtatctggcccgacggcttgtcccggctcgaatcgctctggtattcaccgagttgcgagtcctcacctcgtctcagttacggttcaacgcggagctgctcagcttgcggaaccactgcgagatcgcgctgcgcccactcggcccggggcatgcggccgagctggcccgcgccaccctcggccccggcctctccgacgaaacactcacggagctgtaccgggtgaccggaggcaacctgagtctcagccgcgggctgatcgacgatgtgcgggacgcctgggcacgaggggaaacgggcgtccaggtgggccgggcgttccggctggcctacctcggttccctccaccgctgtggtccgctggcgttgcgggtcgcccgcgtagccgccgtactgggcccgagcgccaccagcgtcctggtgcgccggatcagtgggctcagcgcggaggccatggcccaggcgaccgatatcctcgctgacggcggcctcctgcgcgaccagcggttcacacatccagcggcccgctcggtggtgctcgacgacatgtccgccgaggaacgacgcagcgtgcacagcctcgccctggaactgctggacgaggcaccggccgagatgctcgcgcaccaccgggtcggcgccggtctcgtgcacgggccgaaggccgcggagacattcaccggggccggccgggcactggccgttcgcggcatgctgggcgaggcagccgactacctgcaactggcgtaccgggcctccggcgacgccgctaccaaggccgcgatacgcgtcgagtccgtggcggtcgagcgccgacgcaatccgctggtcgtcagtcgccattgggacgagctgagcgtcgcggcccgcgccggtctgctctcctgcgagcacgtgtccaggacggcccgctggctgaccgtcggtgggcggcccggcgaggcggccagggtgctggcgtcgcaacaccgacgggtcgtcaccgatcaggaccgggcccacctgcgggtcgccgagttctcgctcgcgctgctgtaccccggtacgtccggctcggaccggcgcccgcacccgctcacgtcggacgaactcgcggccctaccgactgcgaccagacactgcgcgatcgccgataacgctgtcatggctgccttgcgtggtcatccggagcttgccaccgccgaggcagaagccgttctgcagcaagccgacgcggcggacggcgctgctctcaccgcgctgatggccctgctgtacgcggagagcatcgaggtcgctgaagtctgggcggacaagctggcggcagaggccggagcatcgaacgggcaggacgcggagtacgccggtatacgcgccgaaatcgccctgcggcgcggcgatctgaccgcggccgtcgagaccgccggcatggtcctggacggccggccgctgccgtcgctcgacatcaccgccacgttgctgttggccggcagggcgtccgtcgccgtccggctgggcgaactcgaccacgcggaggagctgttcgccgcgccgccggaggacgccttccaggacagcctcttcggtctgcatctgctctcggcgcacggccagtacagcctcgcgacaggccggcccgagtcggcataccgggcctttcgtgcctgcggcgaacgtatgcgcgattggggcttcgacgcgcccggtgtggccctgtggcgcgtcggcgccgccgaggcgctgctcggcctcgaccggaacgagggccgacggctcatcgacgaacagctgagccggacgatggccccccggtcccacgcgttgacgctgcggataaaagcggcgtacatgccggagccgaagcgggtcgacctgctctacgaagcggctgagctgctgctctcctgccgggaccagtatgagcgagcgcgggtgctcgccgatctgggcgaggcgctcagcgcgctcgggaactaccggcaggcgcgaggtgtgctccggcaggctcggcatctggccatgcgaaccggcgcggacccgctgctgcgccggctcggaatcaggcccggccggcaggacgaccccgacccgcagccgcggagcagatcgctgaccaacgctgagcggcgtgcggcgtcgctggccgcgaccggactgaccaaccgggagatcgccgaccggctcttcgtcaccgccagcaccgtggagcagcacctcaccaacgtcttccgcaagctgggcgtcaagggccgcaagcagctgccggccgagttggacgacatggaatag

SEQ ID NO: 192 - DNA, 2715 bp, Streptomyces filamentosus
atgcgagctattaatgcgtccgacaccggtcctgaactggtcgcccgcgaagacgaactgggacgtgtacgaagtgccctgaaccgagcgaacggcggccaaggtgtcctgatctccattaccggtccgatcgcctgcggcaagaccgaactgcttgaggctgccgcctcggaagttgacgccatcactctgcgcgcggtctgtgccgccgaggaacgggcgataccttatgccctgatcgggcagcttatcgacaaccccgcgctcggcattccggttccggatccggccggcctgaccgcccagggcggacgactgtcatcgagcgccgagaaccgactgcgtcgcgacctcacccgtgccctgctgacgctcgccaccgaccggctggtgctgatctgtgtcgatgacgtgcagcacgccgacaacgcctcgttgagctgccttctgtatctggcccgacggcttgtcccggctcgaatcgctctggtattcaccgagttgcgagtcctcacctcgtctcagctgcggttcaacgcggagctgctcagcttgcggaaccactgcgagatcgcgctgcgcccactcggcccggggcatgcggccgagctggcccgcgccaccctcggccccggcctctccgacgaaacactcacggagctgtaccgggtgaccggaggcaacctgagtctcagccgcgggctgatcgacgatgtgcgggacgcctgggcacgaggggaaacgggcgtccaggtgggccgggcgttccggctggcctacctcggttccctccaccgctgtggtccgctggcgttgcgggtcgcccgcgtagccgccgtactgggcccgagcgccaccagcgtcctggtgcgccggatcagtgggctcagcgcggaggccatggcccaggcgaccgatatcctcgctgacggcggcctcctgcgcgaccagcggttcacacatccagcggcccgctcggtggtgctcgacgacatgtccgccgaggaacgacgcagcgtgcacagcctcgccctggaactgctggacgaggcaccggccgagatgctcgcgcaccaccgggtcggcgccggtctcgtgcacgggccgaaggccgcggagacattcaccggggccggccgggcactggccgttcgcggcatgctgggcgaggcagccgactacctgcaactggcgtaccgggcctccggcgacgccgctaccaaggccgcgatacgcgtcgagtccgtggcggtcgagcgccgacgcaatccgctggtcgtcagtcgccattgggacgagctgagcgtcgcggcccgcgccggtctgctctcctgcgagcacgtgtccaggacggcccgctggctgaccgtcggtgggcggcccggcgaggcggccagggtgctggcgtcgcaacaccgacgggtcgtcaccgatcaggaccgggcccacctgcgggtcgccgagttctcgctcgcgctgctgtaccccggtacgtccggctcggaccggcgcccgcacccgctcacgtcggacgaactcgcggccctaccgactgcgaccagacactgcgcgatcgccgataacgctgtcatggctgccttgcgtggtcatccggagcttgccaccgccgaggcagaagccgttctgcagcaagccgacgcggcggacggcgctgctctcaccgcgctgatggccctgctgtacgcggagagcatcgaggtcgctgaagtctgggcggacaagctggcggcagaggccggagcatcgaacgggcaggacgcggagtacgccggtatacgcgccgaaatcgccctgcggcgcggcgatctgaccgcggccgtcgagaccgccggcatggtcctggacggccggccgctgccgtcgctcgacatcaccgccacgttgctgttggccggcagggcgtccgtcgccgtccggctgggcgaactcgaccacgcggaggagctgttcgccgcgccgccggaggacgccttccaggacagcctcttcggtctgcatctgctctcggcgcacggccagtacagcctcgcgacaggccggcccgagtcggcataccgggcctttcgtgcctgcggcgaacgtatgcgcgattggggcttcgacgcgcccggtgtggccctgtggcgcgtcggcgccgccgaggcgctgctcggcctcgaccggaacgagggccgacggctcatcgacgaacagctgagccggacgatggccccccggtcccacgcgttgacgctgcggataaaagcggcgtacatgccggagccgaagcgggtcgacctgctctacgaagcggctgagctgctgctctcctgccgggaccagtatgagcgagcgcgggtgctcgccgatctgggcgaggcgctcagcgcgctcgggaactaccggcaggcgcgaggtgtgctccggcaggctcggcatctggccatgcgaaccggcgcggacccgctgctgcgccggctcggaatcaggcccggccggcaggacgaccccgacccgcagccgcggagcagatcgctgaccaacgctgagcggcgtgcggcgtcgctggccgcgaccggactgaccaaccgggagatcgccgaccggctcttcgtcaccgccagcaccgtggagcagcacctcaccaacgtcttccgcaagctgggcgtcaagggccgcaagcagctgccggccgagttggacgacatggaatag

SEQ ID NO: 193 - protein, 894 aa, Streptomyces hygroscopicus
MPAVECYELDARDDELRKLEEVVTGRANGRGVVVTITGPIACGKTELLDAAAAKADAITLRAVCSAEEQALPYALIGQLIDNPALASHALEPACPTLPGEHLSPEAENRLRSDLTRTLLALAAERPVLIGIDESHANALCLLHLARRVGSARIAMVLTELRRLTPAHSQFQAELLSLGHHREIALRPLSPKHTAELVRAGLGPDVDEDVLTGLYRATGGNLNLTRGLINDVREAWETGGTGISAGRAYRLAYLGSLYRCGPVPLRVARVAAVLGQSANTTLVRWISGLNADAVGEATEILTEGGLLHDLRFPHPAARSVVLNDMSAQERRRLHRSALEVLDDVPVEVVAHHQVGAGLLHGPKAAEIFAKAGQELHVRGELDTASDYLQLAHQASDDAVTGMRAEAVAIERRRNPLASSRHLDELTVVARAGLLFPEHTALMIRWLGVGGRSGEAAGLLASQRPRAVTDQDRAHMRAAEVSLALVSPGTSGPDRRPRPLTPDELANLPKAARLCAIADNAVMSALRGRPELAAAEAENVLQHADSAAAGTTALAALTALLYAENTDTAQLWADKLVSETGASNEEEAGYAGPRAEAALRRGDLAAAVEAGSTVLDHRRLSTLGITAALPLSSAVAAAIRLGETERAEKWLAQPLPQAIQDGLFGLHLLSARGQYSLATGQHESAYTAFRTCGERMRNWGVDVPGLSLWRVDAAEALLHGRDRDEGRRLVDEQLTRAMGPRSRALTLRVQAAYSPPAKRVDLLDEAADLLLSCNDQYERARVLADLSETFSALRHHSRARGLLRQARHLAAQRGAIPLLRRLGAKPGGPGWLEESGLPQRIKSLTDAERRVASLAAGGQTNRVIADQLFVTASTVEQHLTDVSTGSRPPAPAAELV

SEQ ID NO: 194 - protein, 923 aa, Streptomyces kanamyceticus
MVPEVRAAPDELIARDDELSRLQRALTRAGSGRGGVVAITGPIASGKTALLDAGAAKSGFVALRAVCSWEERTLPYGMLGQLFDHPELAAQAPDLAHFTASCESPQAGTDNRLRAEFTRTLLALAADWPVLIGIDDVHHADAESLRCLLHLARRIGPARIAVVLTELRRPTPADSRFQAELLSLRSYQEIALRPLTEAQTGELVRRHLGAETHEDVSADTFRATGGNLLLGHGLINDIREARTAGRPGVVAGRAYRLAYLSSLYRCGPSALRVARASAVLGASAEAVLVQRMTGLNKDAVEQVYEQLNEGRLLQGERFPHPAARSIVLDDLSALERRNLHESALELLRDHGVAGNVLARHQIGAGRVHGEEAVELFTGAAREHHLRGELDDAAGYLELAHRASDDPVTRAALRVGAAAIERLCNPVRAGRHLPELLTASRAGLLSSEHAVSLADWLAMGGRPGEAAEVLATQRPAADSEQHRALLRSGELSLALVHPGAWDPLRRTDRFAAGGLGSLPGPARHRAVADQAVIAALRGRLDRADANAESVLQHTDATADRTTAIMALLALLYAENTDAVQFWVDKLAGDEGTRTPADEAVHAGFNAEIALRRGDLMRAVEYGEAALGHRHLPTWGMAAALPLSSTVVAAIRLGDLDRAERWLAEPLPQQTPESLFGLHLLWARGQHHLATGRHGAAYTAFRECGERMRRWAVDVPGLALWRVDAAESLLLLGRDRAEGLRLVSEQLSRPMRPRARVQTLRVQAAYSPPPQRIDLLEEAADLLVTCNDQYELANVLSDLAEASSMVRQHSRARGLLRRARHLATQCGAVPLLRRLGAEPSDIGGAWDATLGQRIASLTESERRVAALAAVGRTNREIAEQLFVTASTVEQHLTNVFRKLAVKGRQQLPKELADVGEPADRDRRCG

SEQ ID NO: 195 - protein, 913 aa, Streptomyces ascomyceticus
MIARLSPPDLIARDDEFGSLHRALTRAGGGRGVVAAVTGPIACGKTELLDAAAAKAGFVTLRAVCSMEERALPYGMLGQLLDQPELAARTPELVRLTASCENLPADVDNRLGTELTRTVLTLAAERPVLIGIDDVHHADAPSLRCLLHLARRISRARVAIVLTELLRPTPAHSQFRAALLSLRHYQEIALRPLTEAQTTELVRRHLGQDAHDDVVAQAFRATGGNLLLGHGLIDDIREARTRTSGCLEVVAGRAYRLAYLGSLYRCGPAALSVARASAVLGESVELTLVQRMTGLDTEAVEQAHEQLVEGRLLREGRFPHPAARSVVLDDLSAAERRGLHELALELLRDRGVASKVLARHQMGTGRVHGAEVAGLFTDAAREHHLRGELDEAVTYLEFAYRASDDPAVHAALRVDTAAIERLCDPARSGRHVPELLTASRERLLSSEHAVSLACWLAMDGRPGEAAEVLAAQRSAAPSEQGRAHLRVADLSLALIYPGAADPPRPADPPAEDEVASFSGAVRHRAVADKALSNALRGWSEQAEAKAEYVLQHSRVTTDRTTTMMALLALLYAEDTDAVQSWVDKLAGDDNMRTPADEAVHAGFRAEAALRRGDLTAAVECGEAALAPRVVPSWGMAAALPLSSTVAAAIRLGDLDRAERWLAEPLPEETSDSLFGLHMVWARGQHHLAAGRYRAAYNAFRDCGERMRRWSVDVPGLALWRVDAAEALLLLGRGRDEGLRLISEQLSRPMGSRARVMTLRVQAAYSPPAKRIELLDEAADLLIMCRDQYELARVLADMGEACGMLRRHSRARGLFRRARHLATQCGAVPLLRRLGGESSDADGTQDVTPAQRITSLTEAERRVASHAAVGRTNKEIASQLFVTSSTVEQHLTNVFRKLGVKGRQQLPKELSDAG

SEQ ID NO: 196 - protein, 901 aa, Micromonospora sp. S92-306401
MEFYDLVARDDELRRLDQALGRAAGGRGVVVTVTGPVGCGKTELLDAAAAEEEFITLRAVCSAEERALPYAVIGQLLDHPVLSARAPDLACVTAPGRTLPADTENRLRRDLTRALLALASERPVLICIDDVHQADTASLNCLLHLARRVASARIAMILTELRRLTPAHSRFEAELLSLRHRHEIALRPLGPADTAELARARLGAGVTADELAQVHEATSGNPNLVGGLVNDVREAWAAGGTGIAAGRAYRLAYLSSVYRCGPVPLRIAQAAAVLGPSATVTLVRRISGLDAETVDEATAILTEGGLLRDHRFPHPAARSVVLDDMSAQERRRLHRSTLDVLDGVPVDVLAHHQAGAGLLHGPQAAEMFARASQELRVRGELDAATEYLQLAYRASDDAGARAALQVETVAGERRRNPLAASRHLDELAAAARAGLLSAEHAALVVHWLADAGRPGEAAEVLALQRALAVTDHDRARLRAAEVSLALFHPGVPGSDPRPLAPEELASLSLSARHGVTADNAVLAALRGRPESAAAEAENVLRNADAAASGPTALAALTALLYAENTDAAQLWADKLAAGIGAGEGEAGYAGPRTVAALRRGDLTTAVQAAGAVLDRGRPSSLGITAVLPLSGAVAAAIRLGELERAEKWLAEPLPEAVHDSLFGLHLLMARGRYSLAVGRHEAAYAAFRDCGERMRRWDVDVPGLALWRVDAAEALLPGDDRAEGRRLIDEQLTRPMGPRSRALTLRVRAAYAPPAKRIDLLDEAADLLLSSNDQYERARVLADLSEAFSALRQNGRARGILRQARHLAAQCGAVPLLRRLGVKAGRSGRLGRPPQGIRSLTEAERRVATLAAAGQTNREIADQLFVTASTVEQHLTNVFRKLGVKGRQQLPAELADLRPPG

SEQ ID NO: 197 - protein, 906 aa, Streptomyces violaceusniger
MYSGTCREGYELVAREDELGILQRSLEQASSGQGVVVTVTGPIACGKTELLDAAAAKAEAIILRAVCAPEERAMPYAMIGQLIDDPALAHRAPGLADRIAQGGQLSLRAENRLRRDLTRALLALAVDRPVLIGVDDVHHADTASLNCLLHLARRVRPARISMIFTELRSLTPTQSRFKAELLSLPYHHEIALRPFGPEQSAELARAAFGPGLAEDVLVGLYKTTRGNLSLSRGLISDVREALANGESAFEAGRAFRLAYLGSLYRCGPVALRVARVAAVLGPSATTTLVRRLSGLSAETIDRATKILTEGGLLLDQQFPHPAARSVVLDDMSAQERRGLHTLALELLDEAPVEVLAHHQVGAGLIHGPKAAEMFAKAGKALVVRNELGDAAEYLQLAHRASDDVSTRAALRVEAVAIERRRNPLASSRHMDELSAAGRAGLLSPKHAALAVFWLADGGRSGEAAEVLASERPLATTDQNRAHLRFVEVTLALFSPGAFGSDRRPPPLTPDELASLPKAAWQCAVADNAAMTALHGHPELATAQAETVLRQADSAADAIPAALIALLYAENTESAHIWADKLGSTNGGVSNEAEAGYAGPCAEIALRRGDLATAFEAGSTVLDDRSLPSLGITAALLLSSKTAAAVRLGELERAEKLLAEPLPNGVQDSLFGLHLLSAYGQYSLAMGRYESALRAFHTCGERMRSWDVDVPGLALWRVDAAEALLSLDRNEGQRLIDEQLTRPMGPRSRALTLRIKAAYLPRTKRIPLLHEAAELLLPCPDPYEQARVLADLGDTLSALRRYSRARGVLRQARHLAAQCGAVPLLRRLGGEPGRIDDAGLPQRSTSLTDAERRVAALAAAGQTNREIAKQLFVTASTVEQHLTSVFRKLGVKGRKQLPTALADVEQT

SEQ ID NO: 198 - protein, 914 aa, Streptomyces hygroscopicus; identical to SEQ ID NO: 168

SEQ ID NO: 199 - protein, 875 aa, Actinoplanes sp. N01-109
MPAVKRNDLVARDGELRWMQEILSQASEGRGAVVTITGAIACGKTVLLDAAAASQDVIQLRAVCSAEEQELPYAMVGQLLDNPVLAARVPALGNLAAAGERLLPGTENRIRRELTRTLLALADERPVLIGVDDMHHADPASLDCLLHLARRVGPARIAIVLTELRRLTPAHSRFQSELLSLRYHHEIGLQPLTAEHTADLARVGLGAEVDDDVLTELYEATGGNPSLCCGLIRDVRQDWEAGVTGIHVGRAYRLAYLSSLYRCGPAALRTARAAAVLGDSADACLIRRVSGLGTEAVGQAIQQLTEGGLLRDQQFPHPAARSVVLDDMSAQERHAMYRSAREAAAEGQADPGTPGEPRAATAYAGCGEQAGDYPEPAGRACVDGAGPAEYCGDPHGADDDPDELVAALGGLLPSRLVAMKIRRLAVAGRPGAAAELLTSQRLHAVTSEDRASLRAAEVALATLWPGATGPDRHPLTEQEAASLPEGPRLLAAADDAVGAALRGRAEYAAAEAENVLRHADPAAGGDAYAAMIALLYTEHPENVLFWADKLDAGRPDEETSYPGLRAETAVRLGDLETAMELGRTVLDQRRLPSLGVAAGLLLGGAVTAAIRLGDLDRAEKWLAEPIPDAIRTSLYGLHVLAARGRLDLAAGRYEAAYTAFRLCGERMAGWDADVSGLALWRVDAAEALLSAGIRPDEGRKLIDDQLTREMGARSRALTLRAQAAYSLPVHRVGLLDEAAGLLLACHDGYERARVLADLGETLRTLRHTDAAQRVLRQAEQAAARCGSVPLLRRLGAEPVRIGTRRGEPGLPQRIRLLTDAERRVAAMAAAGQTNREIAGRLFVTASTVEQHLTSVFRKLGVKGRRFLPTELAQAV

SEQ ID NO: 200 - protein, 906 aa, Streptomyces malaysiensis
MYSGTCREGYELVAREDELGILQRSLEQASSGQGVVVTVTGPIACGKTELLDAAAAKAEAIILRAVCAPEERAMPYAMIGQLIDDPALAHRAPGLADRIAQGGQLSLRAENRLRRDLTRALLALAVDRPVLIGVDDVHHADTASLNCLLHLARRVRPARISMIFTELRSLTPTQSRFKAELLSLPYHHEIALRPFGPEQSAELARAAFGPGLAEDVLAGLYKTTRGNLSLSRGLISDVREALANGESAFEAGRAFRLAYLSSLYRCGPVALRVARVAAVLGPSATTTLVRRLSGLSAETIDRATKILTEGGLLLDQQFPHPAARSVVLDDMSAQERRSLHTLALELLDEAPVEVLAHHQVGAGLIHGPKAAEMFAKAGKALVVRNELGDAAEYLQLAHRASDDVSTRAALRVEAVAIERRRNPLASSRHMDELSAAGRAGLLSPKHAALAVFWLADGGRSGEAAEVLASERPLATTDQNRAHLRFVEVTLALFSPGAFGSDRRPPPLTPDELASLPKAAWQCAVADNAAMTALHGHPELATAQAETVLRQADSAADAIPAALIALLYAENTESAHIWADKLGSTNAGVSNEAEAGYAGPCAEIALRRGDLATAFEAGSAVLDDRSLPSLGITAALLLSSKTAAAVRLGELERAEKLLAEPLPNGVQDSLFGLHLLSAYGQYSLAMGRYESAHRAFRTCGERMRSWDVDVPGLALWRVDAAEALLSLDRNEGQRLIDEQLTRPMGPRSHALTLRIKAAYLPRTKRIPLLHEAAELLLPCPDPYEQARVLADLGDTLSALRRYSRARGVLRQARHLATQCGAVPLLRRLGGEPGRIDDAGLPQRSTSLTDAERRVAALAAAGQTNREIAEQLFVTASTVEQHLTSVFRKLGVKGRKQLPTALADVEQT

SEQ ID NO: 201 - protein, 904 aa, Streptomyces violaceusniger
MYSGTCREGYELVAREDELGILQRSLEEAGSGQGAVVTVTGPIACGKTELLDAAAAKADAIILRAVCAPEERAMPYAMIGQLIDDPALAHRAPELADRIAQGGHLSLRAENRLRRDLTRALLALAVDRPVLIGVDDVHHADTASLNCLLHLARRVRPARISMIFTELRSLTPTQSRFKAELLSLPYHHEIALRPLGPEQSAELAHAAFGPGLAEDVLAGLYGMTRGNLSLSRGLISDVREAQANGESAFEVGRAFRLAYLSSLYRCGPIALRVARVAAVLGPSATTTLVRRLSGLSAETIDRATKILTEGGLLLDHQFPHPAARSVVLDDMSAQERRSLHTLALELLDEAPVEVLAHHQVGAGLIHGPKAAEIFARAGQALVVRNELGDAAEYLQLAHRASDDVSTRAALRVEAVAIERRRNPLASSRHMDELSAAGRAGLLSPKHAALAVFWLADGGRSGEAAEVLASEHPLATTDQNRAHLRFAEVTLALFCPGAFGSDRRPPPLAPDELASLPKAAWQCAVADNAVMTALHAHPELATAQAETVLRQADSAADAIPAALIALLYAENTESAQIWADKLGSTNAGVSNEAEAGYAGPCAEIALRRGDLATAFEAGGTVLDDRPLPSLGITAALLLSSKTAAAVRLGELERAEKLLAEPLPNGVQDSLFGLHLLSAHGQYSLAMGRYESAHRAFHTCGERMRSWGVDVPGLALWRVDAAEALLSLDRNEGQRLIDEQLARPMGPRSRALTLRIKAAYLPRTKRIPLLHEAAELLLSCPDPYEQARVLADLGDTLSALRRYSRARGVLRQARHLATQCGAVPLLRRLGGEPGRIDDAGLPQRSTSLTDAERRVSALAAAGQTNREIAKQLFVTASTVEQHLTSVFRKLGVKGRRQLPTALADVE

SEQ ID NO: 202 - protein, 906 aa, Streptomyces Sp. NRRL F-4729
MYSGTCREGYELVAREDELGILQRSLEQASSGQGVVVTVTGPIACGKTELLDAAAAKAEAIILRAVCAPEERAMPYAMIGQLIDDPALAHRAPGLADRIAQGGQLSLRAENRLRRDLTRALLALAVHRPVLIGVDDVHHADTASLNCLLHLARRVRPARISMIFTELRSLTPTQSRFKAELLSLPYHHEIALRPFGPEQSAELARAAFGPGLAEDVLAGLYKTTRGNLSLSRGLISDVREALANGESAFEAGRAFRLAYLSSLYRCGPVALRVARVAAVLGPSATTTLVRRLSGLSAETIDRATKILTEGGLLLDQQFPHPAARSVVLDDMSAQERRGLHTLALELLDEAPVEVLAHHQVGAGLIHGPKAAEMFAKAGKALVVRNELGDAAEYLQLAHRASDDVSTRAALRVEAVAIERRRNPLASSRHMDELSAAGRAGLLSPKHAALAVFWLADGGRSGEAAQVLASERPLATTDQNRAHLRFVEVTLALFSPGAFGSDRRPPPLTPDELASLPKAAWQCAVADNAAMTALHGHPELATAQAETVLRQADSAADAIPAALIALLYAENTESAHIWADKLGSMNAGVSNEAEAGYAGPCAEIALRRGDLATAFEAGSTVLDDRSLPSLGITAALLLSSKTAAAVRLGELERAEKLLAEPLPNGVQDSLFGLHLLSAYGQYSLAMGRYESAHRAFRTCGERMRSWDVDVPGLALWRVDAAEALLSLDRNEGQRLIDEQLTRPMGPRSRALTLRIKAAYLPRTKRIPLLHEAAELLLPCPDPYEQARVLADLGDTLSALRRYSRARGVLRQARHLATQCGAVPLLRRLGGEPGRIDDAGLPQRSTSLTDAERRVAALAAAGQTNREIAEQLFVTASTVEQHLTSVFRKLGVKGRKQLPTALADVEQT

SEQ ID NO: 203 - protein, 904 aa, Streptomyces filamentosus
MRAINASDTGPELVAREDELGRVRSALNRANGGQGVLISITGPIACGKTELLEAAASEVDAITLRAVCAAEERAIPYALIGQLIDNPALGIPVPDPAGLTAQGGRLSSSAENRLRRDLTRALLTLATDRLVLICVDDVQHADNASLSCLLYLARRLVPARIALVFTELRVLTSSQLRFNAELLSLRNHCEIALRPLGPGHAAELARATLGPGLSDETLTELYRVTGGNLSLSRGLIDDVRDAWARGETGVQVGRAFRLAYLGSLHRCGPLALRVARVAAVLGPSATSVLVRRISGLSAEAMAQATDILADGGLLRDQRFTHPAARSVVLDDMSAEERRSVHSLALELLDEAPAEMLAHHRVGAGLVHGPKAAETFTGAGRALAVRGMLGEAADYLQLAYRASGDAATKAAIRVESVAVERRRNPLVVSRHWDELSVAARAGLLSCEHVSRTARWLTVGGRPGEAARVLASQHRRVVTDQDRAHLRVAEFSLALLYPGTSGSDRRPHPLTSDELAALPTATRHCAIADNAVMAALRGHPELATAEAEAVLQQADAADGAALTALMALLYAESIEVAEVWADKLAAEAGASNGQDAEYAGIRAEIALRRGDLTAAVETAGMVLDGRPLPSLDITATLLLAGRASVAVRLGELDHAEELFAAPPEDAFQDSLFGLHLLSAHGQYSLATGRPESAYRAFRACGERMRDWGFDAPGVALWRVGAAEALLGLDRNEGRRLIDEQLSRTMAPRSHALTLRIKAAYMPEPKRVDLLYEAAELLLSCRDQYERARVLADLGEALSALGNYRQARGVLRQARHLAMRTGADPLLRRLGIRPGRQDDPDPQPRSRSLTNAERRAASLAATGLTNREIADRLFVTASTVEQHLTNVFRKLGVKGRKQLPAELDDME

SEQ ID NO: 204 - DNA, 6 bp, Artificial Sequence
  Synthetic Construct
aggggg

What is claimed is:

1. An engineered polyketide synthase comprising one or more heterologous modules with altered enzymatic activity relative to a reference polyketide, wherein the engineered polyketide synthase is capable of producing a polyketide when expressed under conditions suitable to allow expression of a compound by the engineered polyketide synthase and wherein the one or more heterologous modules do not substantially inhibit polyketide translocation during polyketide biosynthesis.

2. An engineered polyketide synthase comprising one or more heterologous modules with altered enzymatic activity relative to a reference polyketide, wherein the engineered polyketide synthase is capable of producing a polyketide when expressed under conditions suitable to allow expression of a compound by the engineered polyketide synthase and wherein the one or more heterologous modules comprise linking sequences which are compatible to the linking sequences of the modules adjacent thereto.

3. An engineered polyketide synthase comprising one or more heterologous modules with altered enzymatic activity relative to a reference polyketide, wherein the engineered polyketide synthase is capable of producing a polyketide when expressed under conditions suitable to allow expression of a compound by the engineered polyketide synthase and wherein the polyketide expression level of the engineered polyketide synthase is at least 1% of the polyketide expression level of the reference polyketide synthase.

4. The engineered polyketide synthase of any one of claims 1 to 3, wherein the one or more heterologous modules comprise native linking sequences.

5. The engineered polyketide synthase of any one of claims 1 to 4, wherein the engineered polyketide synthase comprises two or more heterologous modules.

6. The engineered polyketide synthase of claim 5, wherein the two or more heterologous modules are adjacent.

7. The engineered polyketide synthase of any one of claims 1 to 6, wherein the engineered polyketide synthase comprises three or more heterologous modules.

8. The engineered polyketide synthase of claim 7, wherein the three or more heterologous modules are adjacent.

9. The engineered polyketide synthase of any one of claims 1 to 8, wherein the heterologous module is an elongation module which modifies a β-carbonyl unit in the variable region of the polyketide.

10. The engineered polyketide synthase of any one of claims 1 to 9, wherein at least one of the one or more heterologous modules comprises a portion having at least 90% identity to any one of SEQ ID NO: 1-174.

11. The engineered polyketide synthase of any one of claims 1 to 10, wherein at least one of the one or more heterologous modules comprises a portion having the sequence of any one of SEQ ID NO: 1-174.

12. A chimeric polyketide synthase, wherein at least one module of the chimeric polyketide synthase has been modified as compared to a polyketide synthase having the sequence of SEQ ID NO: 175-176.

13. The chimeric polyketide synthase of claim 12, wherein the at least one module comprises a portion having at least 90% identity to any one of SEQ ID NO: 1-174.

14. A nucleic acid encoding a polyketide synthase of any one of claims 1 to 13.

15. The nucleic acid of claim 15, wherein the nucleic acid further encodes an LAL, wherein the sequence encoding the LAL is operatively linked to the sequence encoding the polyketide synthase.

16. The nucleic acid of claim 15, wherein the LAL is a heterologous LAL.

17. The nucleic acid of claim 15 or 16, wherein LAL comprises a portion having at least 80% identity to SEQ ID NO: 177.

18. The nucleic acid of claim 17, wherein the LAL comprises a portion having the sequence of SEQ ID NO: 177.

19. The nucleic acid of claim 18, wherein the LAL has the sequence of SEQ ID NO: 177.

20. The nucleic acid of any one of claims 14 to 19, wherein the nucleic acid encoding the LAL lacks a TTA inhibitory codon in an open reading frame.

21. The nucleic acid of any one of claims 14 to 20, wherein the nucleic acid further comprises an LAL binding site, wherein the sequence encoding the LAL binding site is operatively linked to the sequence encoding the polyketide synthase.

22. The nucleic acid of claim 21, wherein the LAL binding site comprises a portion having at least 80% sequence identity to the sequence of SEQ ID NO: 178.

23. The nucleic acid of claim 22, wherein the LAL binding site comprises a portion having the sequence of SEQ ID NO: 178.

24. The nucleic acid of claim 23, wherein the LAL binding site has of the sequence of SEQ ID NO: 178.

25. The nucleic acid of claim 21, wherein the LAL binding site has the sequence GGGGGT (SEQ ID NO: 179).

26. The nucleic acid of any one of claims 21 to 25, wherein the binding of an LAL to the LAL binding site promotes expression of the polyketide synthase.

27. The nucleic acid of any one of claims 14 to 26, wherein the nucleic acid further encodes a nonribosomal peptide synthase.

28. The nucleic acid of any one of claims 14 to 27, wherein the nucleic acid further encodes a first P450 enzyme.

29. The nucleic acid of claim 28, wherein the nucleic acid further encodes a second P450 enzyme.

30. An expression vector comprising a nucleic acid of any one of claims 14 to 29.

31. The expression vector of claim 30, wherein the expression vector is an artificial chromosome.

32. The expression vector of claim 31, wherein the artificial chromosome is a bacterial artificial chromosome.

33. A host cell comprising an expression vector of any one of claims 30 to 32.

34. A host cell comprising a polyketide synthase of any one of claims 1 to 13, wherein the polyketide is heterologous to the host cell.

35. The host cell of claim 33 or 34, wherein the host cell naturally lacks an LAL.

36. The host cell of any one of claims 33 to 35, wherein the host cell naturally lacks an LAL binding site.

37. The host cell of any one of claims 33 to 36, wherein the host cell comprises an LAL capable of binding to an LAL binding site and regulating expression of a polyketide synthase.

38. The host cell of claim 37, wherein the LAL is heterologous.

39. The host cell of claim 37 or 38, wherein the LAL comprises a portion having at least 80% identity to the sequence of SEQ ID NO: 177.

40. The host cell of any one of claims 33 to 39, wherein the host cell is a bacterium.

41. The host cell of claim 40, wherein the bacterium is an actinobacterium.

42. The host cell of claim 41, wherein the actinobacterium is Streptomyces ambofaciens, Streptomyces hygroscopicus, or Streptomyces malayensis.

43. The host cell of claim 42, wherein the actinobaceterium is S1391, S1496, or S2441.

44. The host cell of any one of claims 33 to 43, wherein the host cell has been modified to enhance expression of a polyketide synthase.

45. The host cell of claim 44, wherein the host cell has been modified to enhance expression of a compound-producing protein by (i) deletion of an endogenous gene cluster which expresses a compound-producing protein; (ii) insertion of a heterologous gene cluster which expresses a compound-producing protein; (iii) exposure of the host cell to an antibiotic challenge; and/or (iv) introduction of a heterologous promoter that results in an at least 2-fold increase in expression of a compound compared to the homologous promoter.

46. A method of producing a polyketide, the method comprising culturing a host cell of any one of claims 33 to 45 under suitable conditions.

47. A method of producing a polyketide, the method comprising culturing a host cell engineered to express a polyketide synthase of any one of claims 1 to 13 under conditions suitable for polyketide synthase to produce a polyketide.

48. A method of producing a compound, the method comprising:
a) providing a parent polyketide synthase sequence capable of producing a compound;
(b) determining the compatibility of at least one module of a second polyketide synthase with at least two modules of the parent polyketide synthase;
(c) producing a nucleic acid encoding a modified polyketide synthase, wherein the modified polyketide synthase comprises at least one module of a second polyketide synthase which has been determined to be compatible with the at least two modules of the parent polyketide synthase.

49. A method of producing a compound, the method comprising:
(a) providing a parent nucleic acid encoding a parent polyketide synthase;
(b) modifying the parent nucleic acid to create a modified nucleic acid encoding a modified polyketide synthase capable of producing a compound, wherein the modification produces a modified polyketide synthase comprising at least one heterologous module.

50. A method of producing a compound, the method comprising:
(a) providing a parent polynucleotide sequence capable of producing a compound;
(b) identifying one or more heterologous modules suitable for replacement of one or more modules in the parent polynucleotide sequence;
(c) producing a nucleic acid encoding a modified polyketide synthase, wherein the modified polyketide synthase comprises at least one heterologous module identified in step (b).

51. A method of producing a plurality of polynucleotides, wherein each of the plurality of polynucleotides corresponds to an engineered polyketide synthase, and wherein each of the plurality of polynucleotides comprises one or more heterologous modules with altered enzymatic activity relative to a reference polyketide, wherein the method comprises:
(a) providing a parent polynucleotide sequence encoding a polyketide synthase;
(b) identifying one or more modules for replacement in the parent polynucleotide sequence;
(c) identifying two or more heterologous modules suitable for replacement for each of the modules identified in step (b);
(d) generating a plurality of polynucleotides, wherein each of the plurality of polynucleotides corresponds to an engineered polyketide synthase, and wherein each of the plurality of polynucleotides comprises a heterologous module selected from the two or more heterologous modules identified in step (c) in replacement of each of the one or more modules to be replaced identified in step (b).
